(19) United States
(12) Patent Application Publication
(10) Pub. No.: US 2020/0085869 A1
(43) Pub. Date: Mar. 19, 2020

(54) THERAPEUTIC REGIMENS FOR CHIMERIC ANTIGEN RECEPTOR THERAPIES

(71) Applicants: Novartis AG, Basel (CH); The Trustees of the University of Pennsylvania, Philadelphia, PA (US)

(72) Inventors: Stephen Schuster, Springfield, PA (US); Lamis Eldjerou, Morris Plains, NJ (US); John Peter Plastaras, Philadelphia, PA (US); William Tristram Arscott, Portland, OR (US); Stephan Grupp, Havertown, PA (US)

(21) Appl. No.: 16/413,158

(22) Filed: May 15, 2019

Related U.S. Application Data
(60) Provisional application No. 62/748,019, filed on Oct. 19, 2018.
(60) Provisional application No. 62/672,329, filed on May 16, 2018.

(51) Int. Cl. A61K 35/17; C07K 14/705; A61P 35/04; C07K 14/725; C12N 15/86

(52) U.S. Cl. CPC A61K 35/17; C07K 14/70507; A61P 35/04; A61K 45/06; C07K 14/70521; C07K 14/7051; C12N 15/86; C07K 14/70596

(57) ABSTRACT

The invention provides a method of treating an adult subject having a hematological cancer, comprising administering to the subject selected dosage regimens comprising a plurality of immune effector cells expressing a CAR molecule.

### CROSS-REFERENCE TO RELATED APPLICATIONS

[0001] This application claims the benefit of U.S. Provisional Application 62/672,329 filed on May 16, 2018, and U.S. Provisional Application 62/748,019 filed on Oct. 19, 2018, the entire contents of each of which are hereby incorporated by reference.

### FIELD OF THE INVENTION

[0002] The present invention relates, at least in part, to dosage regimens for immune cells engineered to express a Chimeric Antigen Receptor (CAR).

### BACKGROUND OF THE INVENTION

[0003] Many patients with B cell malignancies are incurable with standard therapy. In addition, traditional treatment options often have serious side effects. Attempts have been made in cancer immunotherapy, however, several obstacles render this a very difficult goal to achieve clinical effectiveness. Although hundreds of so-called tumor antigens have been identified, these are generally derived from self and thus are poorly immunogenic. Furthermore, tumors use several mechanisms to render themselves hostile to the initiation and propagation of immune attack.

[0004] Recent developments using chimeric antigen receptor (CAR) modified autologous T cell (CART) therapy, which relies on redirecting T cells to a suitable cell-surface molecule on cancer cells such as B cell malignancies, show promising results in harnessing the power of the immune system to treat B cell malignancies and other cancers (see, e.g., Sadelain et al., Cancer Discovery 3:388-398 (2013)). The clinical results of the murine derived CART19 (i.e., “CTL019”) have shown promise in establishing complete remissions in patients suffering with CLL as well as in childhood ALL (see, e.g., Kalos et al., Sci Transl Med 3:95ra73 (2011), Porter et al., NEJM 365:725-733 (2011), Grupp et al., NEJM 368:1509-1518 (2013)). Besides the ability for the chimeric antigen receptor on the genetically modified T cells to recognize and destroy the targeted cells, a successful therapeutic T cell therapy needs to have the ability to proliferate and persist over time, in order to survey for leukemic relapse. The variable quality of T cells, resulting from anergy, suppression, or exhaustion, will have effects on CAR-transformed T cells' performance, over which skilled practitioners have limited control at this time. To be effective, CAR transformed patient T cells need to persist and maintain the ability to proliferate in response to the cognate antigen. It has been shown that ALL patient T cells perform can do this with CART19 comprising a murine scFv (see, e.g., Grupp et al., NEJM 368:1509-1518 (2013)).

### SUMMARY OF THE INVENTION

[0005] The disclosure features, at least in part, CAR dosing regimens comprising combinations of CAR therapy with, e.g., radiotherapy (radiation therapy) or stem cell therapy (SCT). In one embodiment, the invention pertains to a method of treating a subject having a cancer (e.g., a hematological cancer, e.g., B-Acute Lymphocytic Leukemia (B cell ALL) or Non-Hogkin Lymphom (NHL)), comprising administering to the subject a CAR-expressing cell therapy, e.g., a CAR19 expressing cell therapy, in combination with radiotherapy or SCT. Additionally, disclosed herein is a method of treating, e.g., preventing cytokine release syndrome (CRS) in a subject with a CAR-expressing cell therapy by administering to the subject radiotherapy before the administration of the CAR-expressing cell therapy. The methods disclosed herein can result, e.g., in improved efficacy of the CAR-expressing cell therapy and reduced side effects, e.g., CRS, associated with the CAR-expressing cell therapy. Accordingly, methods comprising a plurality of CAR-expressing cells, as well as methods of monitoring, or making, a CAR-expressing therapy are disclosed.

[0006] Accordingly, in one aspect, disclosed herein is a method of treating a subject comprising administering to the subject a CAR-expressing cell therapy, e.g., a CAR19 expressing cell therapy, wherein the CAR-expressing cell therapy is administered less than 30 days, e.g., less than 29, 28, 27, 26, 25, 24, 23, 22, 21, 20, 19, 18, 17, 16, 15, 14, 13, 12, 11, 10, 9, 8, 7, 6, 5, 4, 3, 2, or 1 days, after administration of a lymphodepleting therapy comprising radiotherapy.

[0007] In another aspect, the disclosure provides a method of treating, e.g., preventing, cytokine release syndrome (CRS) with a CAR-expressing cell therapy, e.g., a CAR19 expressing cell therapy, in a subject in need thereof, comprising administering to the subject a lymphodepleting therapy comprising radiotherapy, thereby preventing CRS in the subject.

[0008] In some embodiments, the radiotherapy is administered less than 30 days, e.g., less than 29, 28, 27, 26, 25, 24, 23, 22, 21, 20, 19, 18, 17, 16, 15, 14, 13, 12, 11, 10, 9, 8, 7, 6, 5, 4, 3, 2, or 1 days, prior to the administration of the CAR-expressing cell therapy.

[0009] In some embodiments, the subject (i) is at risk of developing, has, or is diagnosed with CRS; (ii) is identified or has previously been identified as being at risk for CRS; and/or (iii) has been, is being, or will be administered a CAR therapy, e.g., a CD19 CAR-expressing cell. In some embodiments, the subject is selected based on
[0010] (i) risk of developing CRS, and/or
[0011] (ii) whether the subject has been, is being, or will be administered a CAR therapy (e.g., CD19 CAR-expressing cell).

[0012] In some embodiments, the subject is selected for administration of radiotherapy if the subject is at risk of developing CRS. In some embodiments, the CRS is a severe CRS, e.g., grade 4 or 5 CRS. In some embodiments, the CRS is a less than severe CRS, e.g., grade 1, 2, or 3 CRS.

[0013] In some embodiments, the subject is selected for administration of radiotherapy if the subject will be administered a CAR therapy, e.g., a CD19 CAR-expressing cell.

[0014] In some embodiments of any of the methods disclosed herein, the lymphodepleting therapy comprises radiotherapy. In some embodiments, the radiotherapy is administered at a dose of about 1-100 Gy, e.g., about 1-10, 10-20, 20-30, 30-40, 40-50, 50-60, 60-70, 80-90, or 90-100 Gy, or about 1-99, 5-90, 10-85, 15-80, 20-75, 25-70, 30-65, 35-60, 40-55 or 45-50 Gy. In some embodiments, the radiotherapy is administered at a dose of about 50 Gy, e.g, about 49, 48, 47, 46, 45, 44, 43, 42, 41, 40, 35, 30, 25, 24, 23, 22, 21, 20, 15, 10, 9, 8, 7, 6, 5, 4, 3, 2.9, 2.8, 2.7, 2.6, 2.5, 2.4, 2.3, 2.2, 2.1, 2 or 1 Gy. In some embodiments, the radiotherapy is administered at a dose of about 40 Gy, e.g., 40 Gy. In some embodiments, the radiotherapy is administered at a dose of about 22 Gy, e.g., 22 Gy. In some embodiments, the radiotherapy is administered at a dose of about 4 Gy, e.g., 4 Gy. In some embodiments, the radiotherapy is administered at a dose of about 2.2 Gy, e.g., 2.2 Gy.

[0015] In some embodiments of any of the methods disclosed herein, the radiotherapy is administered as a single dose, e.g., at a dose described herein.

[0016] In some embodiments of any of the methods disclosed herein, the radiotherapy is administered as a fractionated dose, e.g., one or more doses (e.g., two, three or four partial doses). In some embodiments, the radiotherapy consists of a total dose administered as a fractionated dose, e.g., one or more doses (e.g., two, three or four partial doses). In some embodiments, the radiotherapy is administered as two doses, e.g., two fractionated doses, e.g., a first dose and a second dose. In some embodiments, the first dose, e.g., first fractionated dose, is at least about 40 fold, e.g., about 39, 38, 37, 36, 35, 34, 33, 32, 31, 30, 29, 28, 27, 26, 25, 24, 23, 22, 21, 20, 19, 18, 17, 16, 15, 14, 13, 12, 11, 10, 9, 8, 7, 6, 5, 4, 3, 2, or 1.5 fold, higher than the subsequent dose, e.g., second dose, e.g., second fractionated dose. In some embodiments, the first dose, e.g., first fractionated dose, is at least about 20 fold higher than the subsequent dose, e.g., second dose, e.g., second fractionated dose. In some embodiments, the first dose, e.g., first fractionated dose, is at least about 10 fold higher than the subsequent dose, e.g., second dose, e.g., second fractionated dose. In some embodiments, the first dose, e.g., first fractionated dose, is at least about 2 fold higher than the subsequent dose, e.g., second dose, e.g., second fractionated dose. In some embodiments, the first dose, e.g., first fractionated dose is about 40 Gy, and the second dose, e.g., second fractionated dose, is about 2 Gy. In some embodiments, the first dose, e.g., first fractionated dose is about 4 Gy, and the second dose, e.g., second fractionated dose, is about 2 Gy. In some embodiments, the first dose, e.g., first fractionated dose is about 22 Gy, and the second dose, e.g., second fractionated dose, is about 2.2 Gy.

[0017] In some embodiments, the one or more fractionated doses of radiotherapy, e.g., first, second, third and/or fourth fractionated doses of radiotherapy, are administered 30 days prior to administration of a CAR-expressing cell therapy. In some embodiments, the one or more fractionated doses of radiotherapy, e.g., first, second, third and/or fourth fractionated doses of radiotherapy, are administered within 30 days prior to administration of a CAR-expressing cell therapy.

[0018] In some embodiments, the one or more fractionated doses of radiotherapy, e.g., first and second fractionated doses of radiotherapy, are administered within about 30 days of each other, e.g., the second dose is administered in less than 30 days from the administration of the first dose.

[0019] In some embodiments, the one or more fractionated doses of radiotherapy, e.g., first and second fractionated doses of radiotherapy, are administered more than about 30 days apart, e.g., the second dose is administered more than 30 days, e.g., from the administration of the first dose.

[0020] In some embodiments of any of the methods disclosed herein, the lymphodepleting therapy consists of, e.g., consists essentially of radiotherapy.

[0021] In some embodiments of any of the methods disclosed herein, the lymphodepleting therapy comprises radiotherapy. In some embodiments, the lymphodepleting therapy further comprises a chemotherapeutic agent described herein. In some embodiments, when the lymphodepleting therapy comprises radiotherapy and a chemotherapeutic agent, the chemotherapeutic agent is not cyclophosphamide.

[0022] In some embodiments of any of the methods disclosed herein, the lymphodepleting therapy comprises radiotherapy and a chemotherapeutic agent. In some embodiments, the chemotherapeutic agent is cyclophosphamide. In some embodiments, the cyclophosphamide is administered at a dose of more than 750 mg/m², e.g., about 800, 850, 900, 950, 1000, 1100, 1500 or 2000 mg/m². In some embodiments, the cyclophosphamide is administered at a dose of less than 750 mg/m², e.g., about 700, 650, 600, 550, 500, 400, 300, 200 or 100 mg/m². In some embodiments, the chemotherapeutic agent is cyclophosphamide and the cyclophosphamide is not administered at a does of 750 mg/m².

[0023] In some embodiments of a lymphodepleting therapy comprising radiotherapy and cyclophosphamide, the radiotherapy is not administered at a dose of 4 Gy or 2.2 Gy.

[0024] In an aspect, provided herein is a method of treating a subject comprising administering to the subject a CAR-expressing cell therapy, e.g., a CAR19 expressing cell therapy, wherein the CAR-expressing cell therapy is administered after stem cell therapy (SCT), e.g., autologous SCT or allogeneic SCT, wherein the subject has not responded, e.g., relapsed, to the SCT, thereby treating the subject.

[0025] In some embodiments, the CAR-expressing cell therapy is administered after relapse from SCT, e.g., about 1-12 months, e.g., about 1-3, 3-6, 6-9 or 9-12 months, after relapse. In some embodiments, the CAR-expressing cell therapy is administered after relapse from SCT, e.g., about 1-6 months (e.g., about 1.1-1.5, 1.5-2.0, 2.0-2.5, 2.5-3, 3-3.5, 3.5-4, 4-4.5. 4.5-5, 5-5.5, or 5.5-6 months) after relapse.

[0026] In some embodiments, the subject has a response, e.g., remission, a complete response, or a partial response, to the CAR-expressing cell therapy. In some embodiments, the subject in remission has a minimal residual disease (MRD) negative remission, e.g., MRD negative bone marrow remission. In some embodiments, remission is assessed, e.g., determined, by evaluating MRD in a sample, e.g., cerebral spinal fluid or bone marrow, from the subject.

[0027] In some embodiments, no response to, or relapse from SCT therapy is determined by evaluating the presence, e.g., reappearance, of cancer cells in the subject, e.g., in the blood or bone marrow. In some embodiments, the presence, e.g., reappearance, of cancer cells comprises detection of the cancer cells at or above a threshold, e.g., above 20%, 15%, 10%, 5%, 4%, 3%, 2%, or 1%.

[0028] In some embodiments, the stem cell therapy comprises allogeneic SCT (alloSCT). In some embodiments, the subject receiving alloSCT is a pediatric subject e.g., aged about 18 years of age or younger (e.g., 18, 17, 16, 15, 14, 13, 12, 11, 10, 9, 8, 7, 6, 5, 4, 3, 2, 1 or younger (e.g., 12 months, 6 months, 3 months or less)). In some embodiments, the subject has a leukemia, e.g., ALL, e.g., B cell ALL.

[0029] In some embodiments, the stem cell therapy comprises allogeneic SCT (alloSCT). In some embodiments, the subject receiving alloSCT is an adolescent, e.g., aged about 10-19 years, e.g., about 10, 11, 12, 13, 14, 15, 16, 17, 18 or 19 years). In some embodiments, the subject has a leukemia, e.g., ALL, e.g., B cell ALL.

[0030] In some embodiments, the stem cell therapy comprises allogeneic SCT (alloSCT). In some embodiments, the subject receiving alloSCT is a young adult (e.g., aged about 18-35 years). In some embodiments, the subject has a leukemia, e.g., ALL, e.g., B cell ALL.

[0031] In some embodiments, the SCT comprises autologous SCT.

[0032] In some embodiments, the SCT is administered as a first-line therapy, second-line therapy, third line therapy or fourth line therapy. In some embodiments, the SCT is administered as a first line therapy. In some embodiments, the SCT is administered as a second line therapy.

[0033] In some embodiments, the SCT, e.g., alloSCT, is administered to the subject when the subject is in first complete remission (CR1), e.g., CR1 after alloSCT.

[0034] In some embodiments, the SCT, e.g., alloSCT, is administered to the subject when the subject is in relapse, e.g., first relapse, after SCT, e.g., alloSCT.

[0035] In some embodiments, the subject is in relapse, e.g., a first relapse, a second relapse, a third relapse, a fourth relapse or a fifth relapse.

[0036] In some embodiments, the subject has previously administered a chemotherapy, e.g., as described herein.

[0037] In some embodiments, the subject is a pediatric subject, an adolescent or a young adult. In some embodiments the subject is a pediatric subject, e.g., aged about 18 years of age or younger (e.g., 18, 17, 16, 15, 14, 13, 12, 11, 10, 9, 8, 7, 6, 5, 4, 3, 2, 1 or younger (e.g., 12 months, 6 months, 3 months or less)). In some embodiments, the subject is an adolescent, e.g., aged about 10-19 years, e.g., about 10, 11, 12, 13, 14, 15, 16, 17, 18 or 19 years). In some embodiments, the subject is a young adult (e.g., aged about 18-35 years). In some embodiments, the subject has a hematological cancer, e.g., as described herein. In some embodiments, the subject has a leukemia or a lymphoma. In some embodiments, the subject has a relapsed and/or refractory leukemia or lymphoma. In some embodiments, the subject has ALL, e.g., B cell ALL, e.g., relapsed and/or refractory B-cell ALL. In some embodiments, the subject has NHL, e.g., relapsed and/or refractory NHL.

[0038] Additional components of CAR-expressing cells, and methods pertaining to the invention are described below.

[0039] In one aspect, disclosed herein is a method of treating a subject having a hematological cancer, comprising administering to the subject in need thereof a plurality of cells that express a chimeric antigen receptor (CAR) molecule. In embodiments, the CAR molecule comprises an antigen binding domain that binds to a tumor antigen selected from a group consisting of: TSHR, CD19, CD123, CD22, CD30, CD171, CS-1, CLL-1, CD33, EGFRvIII, GD2, GD3, BCMA, Tn Ag, PSMA, ROR1, FLT3, FAP, TAG72, CD38, CD44v6, CEA, EPCAM, B7H3, KIT, IL-13Ra2, Mesothelin, IL-11Ra, PSCA, PRSS21, VEGFR2, LewisY, CD24, PDGFR-beta, SSEA-4, CD20, Folate receptor alpha, ERBB2 (Her2/neu), MUC1, EGFR, NCAM, Prostase, PAP, ELF2M, Ephrin B2, IGF-I receptor, CAIX, LMP2, gp100, bcr-abl, tyrosinase, EphA2, Fucosyl GM1, sLe, GM3, TGS5, HMWMAA, o-acetyl-GD2, Folate receptor beta, TEM1/CD248, TEM7R, CLDN6, GPRC5D, CXORF61, CD97, CD179a, ALK, Polysialic acid, PLAC1, GloboH, NY-BR-1, UPK2, HAVCR1, ADRB3, PANX3, GPR20, LY6K, OR51E2, TARP, WT1, NY-ESO-1, LAGE-1a, MAGE-A1, legumain, HPV E6,E7, MAGE A1, ETV6-AML, sperm protein 17, XAGE1, Tie 2, MAD-CT-1, MAD-CT-2, Fos-related antigen 1, p53, p53 mutant, prostein, survivin and telomerase, PCTA-1/Galectin 8, MelanA/MART1, Ras mutant, hTERT, sarcoma translocation breakpoints, ML-IAP, ERG (TMPRSS2 ETS fusion gene), NA17, PAX3, Androgen receptor, Cyclin B1, MYCN, RhoC, TRP-2, CYP1B1, BORIS, SART3, PAX5, OY-TES1, LCK, AKAP-4, SSX2, RAGE-1, human telomerase reverse transcriptase, RU1, RU2, intestinal carboxyl esterase, mut hsp70-2, CD79a, CD79b, CD72, LAIR1, FCAR, LILRA2, CD300LF, CLEC12A, BST2, EMR2, LY75, GPC3, FCRL5, and IGLL1. In some embodiments the CAR molecule binds to CD19.

[0040] In embodiments, the subject is a mammal, e.g., a human.

[0041] In some embodiments, the subject has a hyperproliferative disorder, e.g., a cancer, e.g., a hematological cancer or a solid tumor. In some embodiments, the subject has a hematological cancer, e.g., a leukemia or a lymphoma. In some embodiments, the hematological cancer is chosen from acute leukemia, B-cell acute lymphoid leukemia (B-ALL), T-cell acute lymphoid leukemia (T-ALL), small lymphocytic leukemia (SLL), acute lymphoid leukemia (ALL), chronic leukemia, chronic myelogenous leukemia (CML), chronic lymphocytic leukemia (CLL), B cell promyelocytic leukemia, blastic plasmacytoid dendritic cell neoplasm, Burkitt's lymphoma, diffuse large B cell lymphoma, follicular lymphoma, hairy cell leukemia, small cell- or a large cell-follicular lymphoma, malignant lymphoproliferative conditions, MALT lymphoma, mantle cell lymphoma (MCL), marginal zone lymphoma, multiple myeloma, myelodysplasia and myelodysplastic syndrome, non-Hodgkin lymphoma (NHL) (e.g., relapsed/refractory NHL), Hodgkin's lymphoma (HL), multiple myeloma, plasmablastic lymphoma, plasmacytoid dendritic cell neoplasm, or Waldenstrom macroglobulinemia. In some embodiments, the hematological cancer is acute lymphoid leukemia (ALL), e.g., B-cell ALL, e.g., relapsed or refractory B-cell ALL. In some embodiments, the hematological cancer is NHL, e.g., relapsed or refractory NHL.

[0042] In some embodiments, the CAR-expressing cell therapy, e.g., CAR19 expressing cell therapy, comprises a plurality of cells. In some embodiments, the CAR-expressing cell therapy, e.g., CAR19 expressing cell therapy, is administered in a single infusion or a split-dose infusion. In some embodiments, the CAR-expressing cell therapy, e.g., CAR19 expressing cell therapy, is administered in a single infusion. In some embodiments, the CAR19-expressing cell therapy is administered at a dosage of about 1×10⁸, 2×10⁸, 3×10⁸, 4×10⁸, 5×10⁸, 6×10⁸, 7×10⁸, 8×10⁸, 9×10⁸ cells, e.g., about 5×10⁸ cells, e.g., about 5×10⁸ cells in a single infusion. In some embodiments (e.g., when treating DLBCL, e.g., relapsed or refractory DLBCL), the CAR19-expressing cell therapy is administered at a dosage of about 6×10⁸ cells, e.g., about 6×10⁸ cells in a single infusion. In some embodiments (e.g., when treating DLBCL or ALL, e.g., relapsed or refractory DLBCL or ALL), the CAR19-expressing cell therapy is administered at a dosage of about 0.1, 0.2, 0.3, 0.4, 0.5, 0.6, 0.7, 0.8, or 0.9×10⁸ cells in a single infusion.

[0043] In some embodiments of any of the methods disclosed herein, the CAR19-expressing cell therapy comprises a cell (e.g., a population of cells) expressing a murine CAR molecule that binds to CD19 comprising:
[0044] (i) one or more of (e.g., all three of) heavy chain complementary determining region 1 (HCDR1), HCDR2, and HCDR3 of any CD19 scFv domain amino acid sequence listed in Table 3 and one or more of (e.g., all three of) light chain complementary determining region 1 (LCDR1), LCDR2, and LCDR3 of any CD19 scFv domain amino acid sequence listed in Table 3,
[0045] (ii) a heavy chain variable region (VH) of any CD19 scFv domain amino acid sequence listed in Table 3 and a light chain variable region (VL) of any CD19 scFv domain amino acid sequence listed in Table 3,
[0046] (iii) a CD19 scFv domain amino acid sequence listed in Table 3 (e.g., SEQ ID NO: 59, 109, 111, or 114), or
[0047] (iv) a full-length CD19 CAR amino acid sequence listed in Table 3 (e.g., SEQ ID NO: 110, 112, 113, or 115, or residues 22-486 of SEQ ID NO: 58)

[0048] In some embodiments, the CAR19-expressing cell therapy comprises a cell (e.g., a population of cells) expressing a humanized CAR molecule that binds to CD19 comprising:
[0049] (i) one or more of (e.g., all three of) heavy chain complementary determining region 1 (HCDR1), HCDR2, and HCDR3 of any CD19 scFv domain amino acid sequence listed in Table 2 and one or more of (e.g., all three of) light chain complementary determining region 1 (LCDR1), LCDR2, and LCDR3 of any CD19 scFv domain amino acid sequence listed in Table 2,
[0050] (ii) a heavy chain variable region (VH) of any CD19 scFv domain amino acid sequence listed in Table 2 and a light chain variable region (VL) of any CD19 scFv domain amino acid sequence listed in Table 2,
[0051] (iii) a CD19 scFv domain amino acid sequence listed in Table 2 (e.g., any one of SEQ ID NOs: 1-12), or
[0052] (iv) a full-length CD19 CAR amino acid sequence listed in Table 2 (e.g., residues 22-486 of any one of SEQ ID NOs: 31-34 or 42, or residues 22-491 of any one of SEQ ID NOs: 35-41)

[0053] In some embodiments, the CAR molecule comprises:
[0054] (i) a scFv;
[0055] (ii) a transmembrane domain that comprises a transmembrane domain of a protein selected from the group consisting of the alpha, beta or zeta chain of the T-cell receptor, CD28, CD3 epsilon, CD45, CD4, CD5, CD8, CD9, CD16, CD22, CD33, CD37, CD64, CD80, CD86, CD134, CD137 and CD154;
[0056] (iii) a hinge region comprising SEQ ID NO:14, or a sequence with 95-99% identity thereof;
[0057] (iv) a costimulatory domain that is a functional signaling domain obtained from a protein selected from the group consisting of OX40, CD2, CD27, CD28, CD5, ICAM-1, LFA-1 (CD11a/CD18), ICOS (CD278), and 4-1BB (CD137), wherein optionally the costimulatory domain comprises the amino acid sequence of SEQ ID NO:16 or 51;
[0058] (v) an intracellular signaling domain comprising a functional signaling domain of 4-1BB and/or a functional signaling domain of CD3 zeta; e.g., an intracellular signaling domain comprising the sequence of SEQ ID NO: 16 and/or the sequence of SEQ ID NO:17 or 43; or
[0059] (vi) a leader sequence, optionally wherein the leader sequence comprises the amino acid sequence of SEQ ID NO: 13.

[0060] In some embodiments, the cell comprising a CAR comprises a nucleic acid encoding the CAR. In some embodiments, the nucleic acid encoding the CAR is a lentiviral vector. In some embodiments, the nucleic acid encoding the CAR is introduced into the cells by lentiviral transduction. In some embodiments, the nucleic acid encoding the CAR is an RNA, e.g., an in vitro transcribed RNA. In some embodiments, the nucleic acid encoding the CAR is introduced into the cells by electroporation. In some embodiments,

[0061] In some embodiments, the cell, e.g., plurality of cells, comprise T cells or NK cells. In some embodiments, the T cell comprises an autologous T cell or allogeneic T cell.

[0062] In embodiments, the subject undergoes lymphodepletion, e.g., as described herein (e.g., with fludarabine, cyclophosphamide, or bendamustine or a combination thereof (e.g., fludarabine and cyclophosphamide, e.g., as described herein) before administration of the immune effector cells.

[0063] In embodiments, after administration, the subject experiences complete response (CR), e.g., at day 28 after the administration. In embodiments, the subject has <0.01% minimal residual disease (MRD) (e.g., by flow cytometry), e.g., at day 28 after the administration or 3 months after the administration, e.g., without further anticancer therapy. In embodiments, the subject has CR with MRD (e.g., >0.01%), e.g., at day 28 after the administration or 3 months after the administration, e.g., without further anticancer therapy. In embodiments, after the administration, the subject has no CNS involvement. In embodiments, after the administration, the subject experiences a reduction in CNS status, e.g., from CNS3 to CNS2 or CNS1, or from CNS2 to CNS1. In embodiments, a subject having CNS1 has no detectable blast cells in CSF, a subject having CNS2 has <5 WBC/μl CSF with blast cells; and a subject having CNS3 has □5 WBC/μl CSF with blast cells. In embodiments, the subject is in CR at least at 8, 23, or 31 months after the administration, or at least at 2, 4, 6, 8, 12, 18, 24, 30, or 36 months after the administration. In embodiments, the subject experiences CR for a duration of at least 8, 23, or 31 months after the administration, or at least 2, 4, 6, 8, 12, 18, 24, 30, or 36 months after the administration.

[0064] In embodiments, the method further comprises testing a subject for CNS involvement, e.g., by lumbar puncture and/or by imaging to detect brain or ocular involvement, before or after the administration. In embodiments, the method further comprises testing a subject for bone marrow disease or MRD, before or after the administration. In embodiments, the testing is performed at one or more of 1, 3, 6, 9, or 12 months after the administration.

[0065] In embodiments, after the administration, the subject does not experience one or more of: CRS, severe CRS, encephalopathy (e.g., encephalopathy grade 2-3), seizures (e.g., seizures grade 2-4), vision disturbance, speech disturbance, trigeminal neuralgia, confusion, dizziness, ataxia, or agitation.

[0066] In some embodiments, the immune effector cell is an immune effector cell described herein. In some embodiments, the CAR molecule is a CAR molecule described herein. In some embodiments, the CAR molecule comprises the amino acid sequence of residues 22-486 of SEQ ID NO: 58, residues 22-486 of any one of SEQ ID NOs: 31-34 or 42, or residues 22-491 of any one of SEQ ID NOs: 35-41. In some embodiments the CAR molecule comprises an antigen binding domain comprising one or more sequence selected from SEQ ID NOS:1-12. In embodiments, the immune effector cells are administered as a monotherapy.

[0067] In some aspects, the present disclosure also provides a method of treating a human subject (e.g., a pediatric or young adult subject) having acute lymphoid leukemia (ALL), comprising: administering to the subject immune effector cells expressing a CAR molecule that binds to CD19, wherein said CAR molecule comprises the amino acid sequence of residues 22-486 of SEQ ID NO: 58, residues 22-486 of any one of SEQ ID NOs: 31-34 or 42, or residues 22-491 of any one of SEQ ID NOs: 35-41, at a dose of 2.0-5.0×10⁶ cells/kg.

[0068] In embodiments, the subject experiences remission (e.g., CR or CRi) after the administration of the immune effector cells. In embodiments, the subject is treated with lymphodepleting therapy, e.g., as described herein, before the administration of the immune effector cells.

[0069] In embodiments, the dose of immune effector cells is about 2.0-3.0×10⁶, 2.0-4.0×10⁶, 2.0-5.0×10⁶, 3.0-4.0×10⁶, 3.0-5.0×10⁶, or 4.0-5.0×10⁶ cells/kg. In embodiments, the dose of immune effector cells is about 2.0×10⁶, 3.0×10⁶, or 4.0×10⁶ cells/kg. In embodiments, the dose of immune effector cells is about 1.0-1.5×10⁸, 1.0-2.0×10⁸, 1.0-2.5×10⁸, 1.5-2.0×10⁸, 1.5-2.5×10⁸, or 2.0-2.5×10⁸ cells. In embodiments, the dose of immune effector cells is about 1.0×10⁸, 1.5×10⁸, or 2.0-2.5×10⁸ cells. In embodiments, the subject receives a single dose of cells. In embodiments, the subject weighs ≤50 kg. In embodiments, the subject weighs >50 kg.

[0070] In embodiments of any of the preceding methods, the hematological cancer is a B cell malignancy, e.g., chosen from multiple myeloma, chronic lymphocytic leukemia, acute lymphoblastic leukemia (ALL), or non-Hodgkins lymphoma. In some embodiments, the hematological cancer is ALL, e.g., B-ALL. In some embodiments, the hematological cancer is non-Hodgkin lymphoma (NHL), e.g., relapsed/refractory NHL.

[0071] In some aspects, the present disclosure provides a method of evaluating a subject, e.g., evaluating or monitoring CRS status (e.g., the risk or level of CRS) or the effectiveness of a CAR-expressing cell therapy in a subject, having a cancer.

[0072] In embodiments, the CAR-expressing cell therapy is a CAR19-expressing cell therapy, e.g., for B-ALL, or NHL (e.g., relapsed/refractory NHL).

[0073] In embodiments, the CAR-expressing cell therapy comprises a plurality of CAR-expressing immune effector cells. In embodiments, the CAR-expressing cell therapy is a CAR19 therapy (e.g., CTL019 therapy).

[0074] In embodiments, the subject is evaluated prior to, during, or after receiving the CAR-expressing cell therapy.

[0075] In some aspects, the present disclosure provides a method of evaluating a subject, e.g., evaluating or monitoring the effectiveness of a CAR-expressing cell therapy (e.g., CD19 CAR, e.g., CTL019) in a subject, having a cancer, comprising acquiring a value of a CAR-expressing cell therapy pharmacokinetic measure in the subject, wherein the pharmacokinetic measure is selected from:
[0076] a) peak expansion of CAR-expressing cells, e.g., wherein a peak expansion of over about 3, 3.5, 4, 4.5, or 5 (and optionally up to 6) log₁₀ CAR copies/μg genomic DNA is indicative of response, e.g., CR, PR_{TD}, or PR;
[0077] b) persistence of CAR-expressing cells, e.g., wherein an AUC of over about 300, 350, 400, 450, or 500 (and optionally up to 600 or 700) log₁₀ CAR copies/μg genomic DNA over time (e.g., over 12 months) is indicative of response, e.g., CR, PR_{TD}, or PR; or
[0078] c) in vitro proliferation of CAR-expressing cells, e.g., wherein a CAR-expressing cell fold-expansion of over about 25, 30, 35, 40, 45, 50, 60, 70, 80, 90, or 100 (and optionally up to 100 or 150) fold expansion is indicative of CR, PR_{TD};
[0079] wherein said value is indicative of the subject's responsiveness or relapsing status to the CAR-expressing cell therapy, thereby evaluating the subject.

[0080] In some aspects, the present disclosure provides a method of evaluating a subject, e.g., evaluating or monitoring the effectiveness of a CAR-expressing cell therapy in a subject, having a cancer, comprising acquiring a value of a pro-apoptotic signalling molecule level or activity in the subject, wherein said value is indicative of the subject's responsiveness or relapsing status to the CAR-expressing cell therapy, thereby evaluating the subject.

### CAR Molecules

[0081] In certain embodiments, the method of treatment comprises a CAR therapy, e.g., administration of one or more cells that express one or more CAR molecules. A cell expressing one or more CAR molecules can be an immune effector cell, e.g., a T cell or NK cell. In an embodiment, the subject is a human.

[0082] In one embodiment, the cell expressing the CAR molecule comprises a vector that includes a nucleic acid sequence encoding the CAR molecule. In one embodiment, the vector is selected from the group consisting of a DNA, an RNA, a plasmid, a lentivirus vector, adenoviral vector, or a retrovirus vector. In one embodiment, the vector is a lentivirus vector. In one embodiment, the vector further comprises a promoter. In one embodiment, the promoter is an EF-1 promoter. In one embodiment, the EF-1 promoter comprises a sequence of SEQ ID NO: 100. In one embodiment, the vector is an in vitro transcribed vector, e.g., a vector that transcribes RNA of a nucleic acid molecule described herein. In one embodiment, the nucleic acid sequence in the in vitro vector further comprises a poly(A) tail, e.g., a poly A tail described herein, e.g., comprising about 150 adenosine bases. In one embodiment, the nucleic acid sequence in the in vitro vector further comprises a 3′UTR, e.g., a 3′ UTR described herein, e.g., comprising at least one repeat of a 3′UTR derived from human beta-globulin. In one embodiment, the nucleic acid sequence in the in vitro vector further comprises promoter. In one embodiment, the nucleic acid sequence comprises a T2A sequence.

[0083] In one embodiment, the cell expressing the CAR molecule is a cell described herein, e.g., a human T cell or a human NK cell, e.g., a human T cell described herein or a human NK cell described herein. In one embodiment, the human T cell is a CD8+ T cell. In one embodiment, the human T cell is a CD4+ T cell. In one embodiment, the human T cell is a CD4+/CD8+ T cell. In one embodiment the human T cell is a mixture of CD8+ and CD4+ T cells. In one embodiment, the cell is an autologous T cell. In one embodiment, the cell is an allogeneic T cell. In one embodiment, the cell is a T cell and the T cell is diacylglycerol kinase (DGK) deficient. In one embodiment, the cell is a T cell and the T cell is Ikaros deficient. In one embodiment, the cell is a T cell and the T cell is both DGK and Ikaros deficient.

[0084] In another embodiment, the cell expressing the CAR molecule, e.g., as described herein, can further express another agent, e.g., an agent which enhances the activity of a CAR-expressing cell.

[0085] In one embodiment, the method includes administering a cell expressing the CAR molecule, as described herein, in combination with an agent which enhances the activity of a CAR-expressing cell, wherein the agent is a cytokine, e.g., IL-7, IL-15, IL-21, or a combination thereof. The cytokine can be delivered in combination with, e.g., simultaneously or shortly after, administration of the CAR-expressing cell. Alternatively, the cytokine can be delivered after a prolonged period of time after administration of the CAR-expressing cell, e.g., after assessment of the subject's response to the CAR-expressing cell.

[0086] For example, in one embodiment, the agent that enhances the activity of a CAR-expressing cell can be an agent which inhibits an immune inhibitory molecule. Examples of immune inhibitory molecules include PD1, PD-L1, CTLA4, TIM3, CEACAM (e.g., CEACAM-1, CEACAM-3 and/or CEACAM-5), LAG3, VISTA, BTLA, TIGIT, LAIR1, CD160, 2B4 and TGF beta. In one embodiment, the agent that inhibits an immune inhibitory molecule comprises a first polypeptide, e.g., an inhibitory molecule, associated with a second polypeptide that provides a positive signal to the cell, e.g., an intracellular signaling domain described herein. In one embodiment, the agent comprises a first polypeptide, e.g., of an immune inhibitory molecule such as PD1, PD-L1, CTLA4, TIM3, CEACAM (e.g., CEACAM-1, CEACAM-3 and/or CEACAM-5), LAG3, VISTA, BTLA, TIGIT, LAIR1, CD160, 2B4 or TGF beta, or a fragment of any of these (e.g., at least a portion of the extracellular domain of any of these), and a second polypeptide which is an intracellular signaling domain described herein (e.g., comprising a costimulatory domain (e.g., 41BB, CD27 or CD28, e.g., as described herein) and/or a primary signaling domain (e.g., a CD3 zeta signaling domain described herein). In one embodiment, the agent comprises a first polypeptide of PD1 or a fragment thereof (e.g., at least a portion of the extracellular domain of PD1), and a second polypeptide of an intracellular signaling domain described herein (e.g., a CD28 signaling domain described herein and/or a CD3 zeta signaling domain described herein).

[0087] In one embodiment, lymphocyte infusion, for example allogeneic lymphocyte infusion, is used in the treatment of the cancer, wherein the lymphocyte infusion comprises at least one CD19 CAR-expressing cell described herein and optionally at least one cell expressing a CAR directed against a B-cell antigen. In one embodiment, autologous lymphocyte infusion is used in the treatment of the cancer, wherein the autologous lymphocyte infusion comprises at least one CD19-expressing cell, and optionally at least one cell expressing a CAR directed against a B-cell antigen.

[0088] In one embodiment, the CAR expressing cell, e.g., T cell, is administered to a subject that has received a previous stem cell transplantation, e.g., autologous stem cell transplantation or allogenenic stem cell transplantation, or a subject that has received a previous dose of melphalan.

[0089] In one embodiment, the cell expressing the CAR molecule, e.g., a CAR molecule described herein, is administered in combination with an agent that ameliorates one or more side effect associated with administration of a cell expressing a CAR molecule or with administration of the B-cell inhibitor, e.g., an agent described herein.

[0090] In one embodiment, the cell expressing the CAR molecule, e.g., a CD19 CAR, and the B-cell inhibitor are administered in combination with an additional agent that treats the disease associated with CD19, e.g., an additional agent described herein.

[0091] In one embodiment, the cells expressing a CAR molecule, e.g., a CAR molecule described herein, are administered at a dose and/or dosing schedule described herein.

[0092] In one embodiment, the CAR molecule is introduced into T cells, e.g., using in vitro transcription, and the subject (e.g., human) receives an initial administration of cells comprising a CAR molecule, and one or more subsequent administrations of cells comprising a CAR molecule, wherein the one or more subsequent administrations are administered less than 15 days, e.g., 14, 13, 12, 11, 10, 9, 8, 7, 6, 5, 4, 3, or 2 days after the previous administration. In one embodiment, more than one administration of cells comprising a CAR molecule are administered to the subject (e.g., human) per week, e.g., 2, 3, or 4 administrations of cells comprising a CAR molecule are administered per week. In one embodiment, the subject (e.g., human subject) receives more than one administration of cells comprising a CAR molecule per week (e.g., 2, 3 or 4 administrations per week) (also referred to herein as a cycle), followed by a week of no administration of cells comprising a CAR molecule, and then one or more additional administration of cells comprising a CAR molecule (e.g., more than one administration of the cells comprising a CAR molecule per week) is administered to the subject. In another embodiment, the subject (e.g., human subject) receives more than one cycle of cells comprising a CAR molecule, and the time between each cycle is less than 10, 9, 8, 7, 6, 5, 4, or 3 days. In one embodiment, the cells comprising a CAR molecule are administered every other day for 3 administrations per week. In one embodiment, the cells comprising a CAR molecule are administered for at least two, three, four, five, six, seven, eight or more weeks.

[0093] In one embodiment, a population of cells described herein is administered. In some embodiments the population of cells is isolated or purified.

[0094] In one embodiment, the 4-1BB costimulatory domain comprises a sequence of SEQ ID NO: 16. In one embodiment, the 4-1BB costimulatory domain comprises an amino acid sequence having at least one, two or three modifications (e.g., substitutions) but not more than 20, 10 or 5 modifications (e.g., substitutions) of an amino acid sequence of SEQ ID NO: 16, or a sequence with at least 95%, e.g., 95-99%, identity to an amino acid sequence of SEQ ID NO:16. In one embodiment, the 4-1BB costimulatory domain is encoded by a nucleic acid sequence of SEQ ID NO:60, or a sequence with at least 95%, e.g., 95-99%, identity thereof.

[0095] In one embodiment, the CD27 costimulatory domain comprises a sequence of SEQ ID NO: 16. In one embodiment, the CD27 costimulatory domain comprises an amino acid sequence having at least one, two or three modifications (e.g., substitutions) but not more than 20, 10 or 5 modifications (e.g., substitutions) of an amino acid sequence of SEQ ID NO: 16, or a sequence with 95-99% identity to an amino acid sequence of SEQ ID NO:16. In one embodiment, the CD27 costimulatory domain is encoded by a nucleic acid sequence of SEQ ID NO:17, or a sequence with at least 95%, e.g., 95-99%, identity thereof.

[0096] In one embodiment, the CD28 costimulatory domain comprises a sequence of SEQ ID NO: 1317. In one embodiment, the CD28 costimulatory domain comprises an amino acid sequence having at least one, two or three modifications (e.g., substitutions) but not more than 20, 10 or 5 modifications (e.g., substitutions) of an amino acid sequence of SEQ ID NO: 1317, or a sequence with at least 95%, e.g., 95-99%, identity to an amino acid sequence of SEQ ID NO:1317. In one embodiment, the CD28 costimulatory domain is encoded by a nucleic acid sequence of SEQ ID NO:1318, or a sequence with at least 95%, e.g., 95-99%, identity thereof.

[0097] In one embodiment, the wild-type ICOS costimulatory domain comprises a sequence of SEQ ID NO: 1319. In one embodiment, the wild-type ICOS costimulatory domain comprises an amino acid sequence having at least one, two or three modifications (e.g., substitutions) but not more than 20, 10 or 5 modifications (e.g., substitutions) of an amino acid sequence of SEQ ID NO: 1319, or a sequence with at least 95%, e.g., 95-99%, identity to an amino acid sequence of SEQ ID NO: 1319. In one embodiment, the wild-type ICOS costimulatory domain is encoded by a nucleic acid sequence of SEQ ID NO: 1320, or a sequence with at least 95%, e.g., 95-99%, identity thereof.

[0098] In one embodiment, the Y to F mutant ICOS costimulatory domain comprises a sequence of SEQ ID NO: 1321. In one embodiment, the Y to F mutant ICOS costimulatory domain comprises an amino acid sequence having at least one, two or three modifications (e.g., substitutions) but not more than 20, 10 or 5 modifications (e.g., substitutions) of an amino acid sequence of SEQ ID NO: 1321, or a sequence with at least 95%, e.g., 95-99%, identity to an amino acid sequence of SEQ ID NO: 1321. In one embodiment, the Y to F mutant ICOS costimulatory domain is encoded by a nucleic acid sequence with at least 95%, e.g., 95-99%, identity to a nucleic acid sequence of SEQ ID NO:1320 (wherein SEQ ID NO: 1320 encodes wild-type ICOS).

[0099] In embodiments, the primary signaling domain comprises a functional signaling domain of CD3 zeta. In embodiments, the functional signaling domain of CD3 zeta comprises SEQ ID NO: 17 (mutant CD3 zeta) or SEQ ID NO: 43 (wild-type human CD3 zeta).

[0100] In one embodiment, the method includes administering a population of cells wherein at least one cell in the population expresses a CAR, e.g., having an anti-CD19 domain described herein, and an agent which enhances the activity of a CAR-expressing cell, e.g., a second cell expressing the agent which enhances the activity of a CAR-expressing cell. For example, in one embodiment, the agent can be an agent which inhibits an immune inhibitory molecule. Examples of immune inhibitory molecules include PD1, PD-L1, CTLA4, TIM3, CEACAM (e.g., CEACAM-1, CEACAM-3 and/or CEACAM-5), LAG3, VISTA, BTLA, TIGIT, LAIR1, CD160, 2B4 and TGF beta. In one embodiment, the agent that inhibits an immune inhibitory molecule comprises a first polypeptide, e.g., an inhibitory molecule, associated with a second polypeptide that provides a positive signal to the cell, e.g., an intracellular signaling domain described herein. In one embodiment, the agent comprises a first polypeptide, e.g., of an inhibitory molecule such as PD1, PD-L1, CTLA4, TIM3, CEACAM (e.g., CEACAM-1, CEACAM-3 and/or CEACAM-5), LAG3, VISTA, BTLA, TIGIT, LAIR1, CD160, 2B4 or TGF beta, or a fragment of any of these (e.g., at least a portion of an extracellular domain of any of these), and a second polypeptide which is an intracellular signaling domain described herein (e.g., comprising a costimulatory domain (e.g., 41BB, CD27 or CD28, e.g., as described herein) and/or a primary signaling domain (e.g., a CD3 zeta signaling domain described herein). In one embodiment, the agent comprises a first polypeptide of PD1 or a fragment thereof (e.g., at least a portion of the extracellular domain of PD1), and a second polypeptide of an intracellular signaling domain described herein (e.g., a CD28 signaling domain described herein and/or a CD3 zeta signaling domain described herein).

[0101] In an embodiment, the method further comprises transplanting a cell, e.g., a hematopoietic stem cell, or a bone marrow, into the mammal.

[0102] In one embodiment, the method includes administering a population of cells comprising a CAR described herein, e.g., a CAR having an anti-CD19 domain described herein, and an agent which enhances the activity of a CAR-expressing cell, wherein the agent is a cytokine, e.g., IL-7; IL-15 (e.g., an IL-15 polypeptide); an IL-15 receptor alpha (IL-15Ra) polypeptide; a combination of both a IL-15 polypeptide and a IL-15Ra polypeptide (e.g., hetIL-15); or IL-21, or a combination thereof. The cytokine can be delivered in combination with, e.g., simultaneously or shortly after, administration of the CAR-expressing cell(s). Alternatively, the cytokine can be delivered after a prolonged period of time after administration of the CAR-expressing cell(s), e.g., after assessment of the subject's response to the CAR-expressing cell(s). Related compositions for use and methods of making a medicament are also provided.

[0103] In an embodiment, the composition is a pharmaceutically acceptable composition.

[0104] In some embodiment, the CAR molecules described herein include a binding domain, e.g., a CD19-binding domain as described herein.

[0105] In one embodiment, the CAR molecule comprises a transmembrane domain of a protein selected from the group consisting of the alpha, beta or zeta chain of the T-cell receptor, CD28, CD3 epsilon, CD45, CD4, CD5, CD8, CD9, CD16, CD22, CD33, CD37, CD64, CD80, CD86, CD134, CD137 and CD154. In one embodiment, the transmembrane domain comprises a sequence of SEQ ID NO: 15. In one embodiment, the transmembrane domain comprises an amino acid sequence having at least one, two or three modifications (e.g., substitutions) but not more than 20, 10 or 5 modifications (e.g., substitutions) of an amino acid sequence of SEQ ID NO: 15, or a sequence with 95-99% identity to an amino acid sequence of SEQ ID NO: 15.

[0106] In one embodiment, the binding domain is connected to the transmembrane domain by a hinge region, e.g., a hinge region described herein. In one embodiment, the encoded hinge region comprises SEQ ID NO:14 or SEQ ID NO:45, or a sequence with 95-99% identity thereof.

[0107] In one embodiment, the CAR molecule further comprises a sequence encoding a costimulatory domain, e.g., a costimulatory domain described herein. In one embodiment, the costimulatory domain comprises a functional signaling domain of a protein selected from the group consisting of OX40, CD2, CD27, CD28, CD5, ICAM-1, LFA-1 (CD11a/CD18), ICOS (CD278), and 4-1BB (CD137). In one embodiment, the costimulatory domain comprises a sequence of SEQ ID NO: 16. In one embodiment, the costimulatory domain comprises a sequence of SEQ ID NO:51. In one embodiment, the costimulatory domain comprises an amino acid sequence having at least one, two or three modifications (e.g., substitutions) but not more than 20, 10 or 5 modifications (e.g., substitutions) of an amino acid sequence of SEQ ID NO: 16 or SEQ ID NO:51, or a sequence with at least 95%, e.g., 95-99%, identity to an amino acid sequence of SEQ ID NO: 16 or SEQ ID NO:51. In one embodiment, the costimulatory domain comprises a functional signaling domain of a protein selected from the group consisting of MHC class I molecule, TNF receptor proteins, Immunoglobulin-like proteins, cytokine receptors, integrins, signaling lymphocytic activation molecules (SLAM proteins), activating NK cell receptors, BTLA, a Toll ligand receptor, OX40, CD2, CD7, CD27, CD28, CD30, CD40, CD5, ICAM-1, LFA-1 (CD11a/CD18), 4-1BB (CD137), B7-H3, CDS, ICAM-1, ICOS (CD278), GITR, BAFFR, LIGHT, HVEM (LIGHTR), KIRDS2, SLAMF7, NKp80 (KLRF1), NKp44, NKp30, NKp46, CD19, CD4, CD8alpha, CD8beta, IL2R beta, IL2R gamma, IL7R alpha, ITGA4, VLA1, CD49a, ITGA4, IA4, CD49D, ITGA6, VLA-6, CD49f, ITGAD, CD11d, ITGAE, CD103, ITGAL, CD11a, LFA-1, ITGAM, CD11b, ITGAX, CD11c, ITGB1, CD29, ITGB2, CD18, LFA-1, ITGB7, NKG2D, NKG2C, TNFR2, TRANCE/RANKL, DNAM1 (CD226), SLAMF4 (CD244, 2B4), CD84, CD96 (Tactile), CEACAM1, CRTAM, Ly9 (CD229), CD160 (BY55), PSGL1, CD100 (SEMA4D), CD69, SLAMF6 (NTB-A, Ly108), SLAM (SLAMF1, CD150, IPO-3), BLAME (SLAMF8), SELPLG (CD162), LTBR, LAT, GADS, SLP-76, PAG/Cbp, CD19a, and a ligand that specifically binds with CD83. In embodiments, the costimulatory domain comprises 4-1BB, CD27, CD28, or ICOS.

[0108] In one embodiment, the CAR molecule further comprises a sequence encoding an intracellular signaling domain, e.g., an intracellular signaling domain described herein. In one embodiment, the intracellular signaling domain comprises a functional signaling domain of 4-1BB and/or a functional signaling domain of CD3 zeta. In one embodiment, the intracellular signaling domain comprises the sequence of SEQ ID NO: 16 and/or the sequence of SEQ ID NO:17. In one embodiment, the intracellular signaling domain comprises the sequence of SEQ ID NO:16 and/or the sequence of SEQ ID NO:43. In one embodiment, the intracellular signaling domain comprises a functional signaling domain of CD27 and/or a functional signaling domain of CD3 zeta. In one embodiment, the intracellular signaling domain comprises the sequence of SEQ ID NO: 51 and/or the sequence of SEQ ID NO:17. In one embodiment, the intracellular signaling domain comprises the sequence of SEQ ID NO:51 and/or the sequence of SEQ ID NO:43. In one embodiment, the intracellular signaling domain comprises an amino acid sequence having at least one, two or three modifications (e.g., substitutions) but not more than 20, 10 or 5 modifications (e.g., substitutions) of an amino acid sequence of SEQ ID NO:16 or SEQ ID NO:51 and/or an amino acid sequence of SEQ ID NO:17 or SEQ ID NO:43, or a sequence with at least 95%, e.g., 95-99%, identity to an amino acid sequence of SEQ ID NO:16 or SEQ ID NO:51 and/or an amino acid sequence of SEQ ID NO:17 or SEQ ID NO:43. In one embodiment, the intracellular signaling domain comprises the sequence of SEQ ID NO:16 or SEQ ID NO:51 and the sequence of SEQ ID NO: 17 or SEQ ID NO:43, wherein the sequences comprising the intracellular signaling domain are expressed in the same frame and as a single polypeptide chain.

[0109] In one embodiment, the CAR molecule further comprises a leader sequence, e.g., a leader sequence described herein. In one embodiment, the leader sequence comprises an amino acid sequence of SEQ ID NO: 13, or a sequence with 95-99% identity to an amino acid sequence of SEQ ID NO:13.

[0110] In one aspect, the CAR (e.g., a CD19 CAR) comprises an optional leader sequence (e.g., an optional leader sequence described herein), an extracellular antigen binding domain, a hinge (e.g., hinge described herein), a transmembrane domain (e.g., transmembrane domain described herein), and an intracellular stimulatory domain (e.g., intracellular stimulatory domain described herein). In one aspect an exemplary CAR construct comprises an optional leader sequence (e.g., a leader sequence described herein), an extracellular antigen binding domain, a hinge, a transmembrane domain, an intracellular costimulatory domain (e.g., an intracellular costimulatory domain described herein) and an intracellular stimulatory domain.

[0111] CAR which comprises a transmembrane domain that comprises a transmembrane domain of a protein selected from the group consisting of the alpha, beta or zeta chain of the T-cell receptor, CD28, CD3 epsilon, CD45, CD4, CD5, CD8, CD9, CD16, CD22, CD33, CD37, CD64, CD80, CD86, CD134, CD137 and CD154. In embodiments, the antigen binding domain is connected to the transmembrane domain by a hinge region. In embodiments, the hinge region comprises SEQ ID NO:14, or a sequence with 95-99% identity thereof. In embodiments, the costimulatory domain is a functional signaling domain obtained from a protein selected from the group consisting of OX40, CD2, CD27, CD28, CD5, ICAM-1, LFA-1 (CD11a/CD18), ICOS (CD278), and 4-1BB (CD137). In embodiments, the costimulatory domain is a functional signaling domain obtained from a protein selected from the group consisting of MHC class I molecule, TNF receptor proteins, Immunoglobulin-like proteins, cytokine receptors, integrins, signaling lymphocytic activation molecules (SLAM proteins), activating NK cell receptors, BTLA, a Toll ligand receptor, OX40, CD2, CD7, CD27, CD28, CD30, CD40, CDS, ICAM-1, LFA-1 (CD11a/CD18), 4-1BB (CD137), B7-H3, CDS, ICAM-1, ICOS (CD278), GITR, BAFFR, LIGHT, HVEM (LIGHTR), KIRDS2, SLAMF7, NKp80 (KLRF1), NKp44, NKp30, NKp46, CD19, CD4, CD8alpha, CD8beta, IL2R beta, IL2R gamma, IL7R alpha, ITGA4, VLA1, CD49a, ITGA4, IA4, CD49D, ITGA6, VLA-6, CD49f, ITGAD, CD11d, ITGAE, CD103, ITGAL, CD11a, LFA-1, ITGAM, CD11b, ITGAX, CD11c, ITGB1, CD29, ITGB2, CD18, LFA-1, ITGB7, NKG2D, NKG2C, TNFR2, TRANCE/RANKL, DNAM1 (CD226), SLAMF4 (CD244, 2B4), CD84, CD96 (Tactile), CEACAM1, CRTAM, Ly9 (CD229), CD160 (BY55), PSGL1, CD100 (SEMA4D), CD69, SLAMF6 (NTB-A, Ly108), SLAM (SLAMF1, CD150, IPO-3), BLAME (SLAMF8), SELPLG (CD162), LTBR, LAT, GADS, SLP-76, PAG/Cbp, CD19a, and a ligand that specifically binds with CD83. In embodiments, the costimulatory domain comprises a sequence of SEQ ID NO:16 or SEQ ID NO:51. In embodiments, the intracellular signaling domain comprises a functional signaling domain of 4-1BB and/or a functional signaling domain of CD3 zeta.

[0112] In embodiments, the intracellular signaling domain comprises the sequence of SEQ ID NO: 16 and/or the sequence of SEQ ID NO:17 or SEQ ID NO:43. In embodiments, the CAR further comprises a leader sequence. In embodiments, the leader sequence comprises SEQ ID NO: 13.

[0113] In embodiments, the cells that express the CAR molecule comprise T cells or NK cells.

[0114] In embodiments, the compositions disclosed herein (e.g., nucleic acids, vectors, or cells) are for use as a medicament.

[0115] In embodiments, the compositions disclosed herein are used in the treatment of a hematological cancer.

[0116] In embodiments, the compositions disclosed herein are used in the treatment of a disease associated with expression of a B-cell antigen (e.g., CD19), e.g., a B-cell leukemia or lymphoma (e.g., a CD19-associated disease), e.g., B-cell ALL or NHL (e.g., relapsed or refractory NHL).

[0117] Unless otherwise defined, all technical and scientific terms used herein have the same meaning as commonly understood by one of ordinary skill in the art to which this invention belongs. Although methods and materials similar or equivalent to those described herein can be used in the practice or testing of the present invention, suitable methods and materials are described below. All publications, patent applications, patents, and other references mentioned herein (e.g., sequence database reference numbers) are incorporated by reference in their entirety. For example, all GenBank, Unigene, and Entrez sequences referred to herein, e.g., in any Table herein, are incorporated by reference. Unless otherwise specified, the sequence accession numbers specified herein, including in any Table herein, refer to the database entries current as of Apr. 8, 2015. When one gene or protein references a plurality of sequence accession numbers, all of the sequence variants are encompassed.

[0118] In addition, the materials, methods, and examples are illustrative only and not intended to be limiting.

[0119] Headings, sub-headings or numbered or lettered elements, e.g., (a), (b), (i) etc, are presented merely for ease of reading. The use of headings or numbered or lettered elements in this document does not require the steps or elements be performed in alphabetical order or that the steps or elements are necessarily discrete from one another.

[0120] Other features, objects, and advantages of the invention will be apparent from the description and drawings, and from the claims.

### BRIEF DESCRIPTIONS OF THE DRAWINGS

[0121] FIGS. 1A-1B are graphs depicting patient survival following radiation therapy and CAR19 therapy. The patients were either not administered RT, or treated with remote RT, prior RT or bridging/lymphodepleting RT (e.g., tandem/induction RT). FIG. 1A shows a graph depicting progression-free survival. FIG. 1B shows a graph depicting overall survival.

[0122] FIG. 2 is a graph depicting absolute lymphocyte counts (ALC) in subjects receiving tandem/induction RT. ALC levels before RT and after RT are plotted on the x-axis.

### DETAILED DESCRIPTION

### Definitions

[0123] Unless defined otherwise, all technical and scientific terms used herein have the same meaning as commonly understood by one of ordinary skill in the art to which the invention pertains.

[0124] The term “a” and “an” refers to one or to more than one (i.e., to at least one) of the grammatical object of the article. By way of example, “an element” means one element or more than one element.

[0125] The term “about” when referring to a measurable value such as an amount, a temporal duration, and the like, is meant to encompass variations of ±20% or in some instances ±10%, or in some instances ±5%, or in some instances ±1%, or in some instances ±0.1% from the specified value, as such variations are appropriate to perform the disclosed methods.

[0126] The term “apheresis” as used herein refers to the art-recognized extracorporeal process by which the blood of a donor or patient is removed from the donor or patient and passed through an apparatus that separates out selected particular constituent(s) and returns the remainder to the circulation of the donor or patient, e.g., by retransfusion. Thus, “an apheresis sample” refers to a sample obtained using apheresis.

[0127] The term “bioequivalent” refers to an amount of an agent other than the reference compound (e.g., RAD001), required to produce an effect equivalent to the effect produced by the reference dose or reference amount of the reference compound (e.g., RAD001). In an embodiment the effect is the level of mTOR inhibition, e.g., as measured by P70 S6 kinase inhibition, e.g., as evaluated in an in vivo or in vitro assay, e.g., as measured by an assay described herein, e.g., the Boulay assay, or measurement of phosphorylated S6 levels by western blot. In an embodiment, the effect is alteration of the ratio of PD-1 positive/PD-1 negative T cells, as measured by cell sorting. In an embodiment a bioequivalent amount or dose of an mTOR inhibitor is the amount or dose that achieves the same level of P70 S6 kinase inhibition as does the reference dose or reference amount of a reference compound. In an embodiment, a bioequivalent amount or dose of an mTOR inhibitor is the amount or dose that achieves the same level of alteration in the ratio of PD-1 positive/PD-1 negative T cells as does the reference dose or reference amount of a reference compound.

[0128] The term “inhibition” or “inhibitor” includes a reduction in a certain parameter, e.g., an activity, of a given molecule, e.g., CD20, CD19, or BCMA. For example, inhibition of an activity, e.g., an activity of CD19, of at least 5%, 10%, 20%, 30%, 40%, or more is included by this term. Thus, inhibition need not be 100%. Activities for the inhibitors can be determined as described herein or by assays known in the art. A “B-cell inhibitor” is a molecule, e.g., a small molecule, antibody, CAR or cell comprising a CAR, which causes the reduction in a certain parameter, e.g., an activity, e.g., growth or proliferation, of a B-cell, or which causes a reduction in a certain parameter, e.g., an activity, of a molecule associated with a B cell. Non-limiting examples of molecules associated with a B cell include proteins expressed on the surface of B cells, e.g., CD19, CD20, CD10, CD22, CD34, CD123, FLT-3, ROR1, CD79b, CD179b, CD79a, or BCMA.

[0129] The term “Chimeric Antigen Receptor” or alternatively a “CAR” refers to a set of polypeptides, typically two in the simplest embodiments, which when in an immune effector cell, provides the cell with specificity for a target cell, typically a cancer cell, and with intracellular signal generation. In some embodiments, a CAR comprises at least an extracellular antigen binding domain, a transmembrane domain and a cytoplasmic signaling domain (also referred to herein as “an intracellular signaling domain”) comprising a functional signaling domain derived from a stimulatory molecule and/or costimulatory molecule as defined below. In some embodiments, the set of polypeptides are in the same polypeptide chain, e.g., comprise a chimeric fusion protein. In some embodiments, the set of polypeptides are not contiguous with each other, e.g., are in different polypeptide chains. In some embodiments, the set of polypeptides include a dimerization switch that, upon the presence of a dimerization molecule, can couple the polypeptides to one another, e.g., can couple an antigen binding domain to an intracellular signaling domain. In one aspect, the stimulatory molecule of the CAR is the zeta chain associated with the T cell receptor complex (e.g., CD3 zeta). In one aspect, the cytoplasmic signaling domain comprises a primary signaling domain (e.g., a primary signaling domain of CD3-zeta).

[0130] In one aspect, the cytoplasmic signaling domain further comprises one or more functional signaling domains derived from at least one costimulatory molecule as defined below. In one aspect, the costimulatory molecule is chosen from the costimulatory molecules described herein, e.g., 4-1BB (i.e., CD137), CD27, and/or CD28. In one aspect, the CAR comprises a chimeric fusion protein comprising an extracellular antigen binding domain, a transmembrane domain and an intracellular signaling domain comprising a functional signaling domain derived from a stimulatory molecule. In one aspect, the CAR comprises a chimeric fusion protein comprising an extracellular antigen binding domain, a transmembrane domain and an intracellular signaling domain comprising a functional signaling domain derived from a costimulatory molecule and a functional signaling domain derived from a stimulatory molecule. In one aspect, the CAR comprises a chimeric fusion protein comprising an extracellular antigen binding domain, a transmembrane domain and an intracellular signaling domain comprising two functional signaling domains derived from one or more costimulatory molecule(s) and a functional signaling domain derived from a stimulatory molecule. In one aspect, the CAR comprises a chimeric fusion protein comprising an extracellular antigen binding domain, a transmembrane domain and an intracellular signaling domain comprising at least two functional signaling domains derived from one or more costimulatory molecule(s) and a functional signaling domain derived from a stimulatory molecule. In one aspect the CAR comprises an optional leader sequence at the amino-terminus (N-ter) of the CAR fusion protein. In one aspect, the CAR further comprises a leader sequence at the N-terminus of the extracellular antigen binding domain, wherein the leader sequence is optionally cleaved from the antigen binding domain (e.g., a scFv) during cellular processing and localization of the CAR to the cellular membrane.

[0131] As used herein, the term “treatment” refers to an approach for obtaining a beneficial or a desired result including, but not limited to: a therapeutic benefit; or prevention of a condition, e.g., a side effect, e.g., an unwanted effect as described herein. The terms “treatment”, “treating”, and “ameliorating” are used interchangeably herein. In some embodiments, a therapeutic benefit is obtained by eradication or amelioration of the underlying disorder being treated. In some embodiments, a therapeutic benefit is obtained by reduction of, eradication, or amelioration of one or more of the symptoms, e.g., physiological symptoms, associated with the underlying disorder such that an improvement, e.g., change, is observed in the patient. In some embodiments, the patient can still be afflicted with the underlying disorder. In some embodiments, treatment comprises prevention of a condition, e.g., a side effect, e.g., an unwanted side effect from a therapy. Treatment or prevention of a condition or a side effect need not be a complete treatment or prevention of the condition or side effect.

[0132] As used herein, unless otherwise specified, the terms “prevent,” “preventing” and “prevention” refer to an action that occurs before the subject begins to suffer from the condition, or relapse of the condition. Prevention need not result in a complete prevention of the condition; partial prevention or reduction of the condition or a symptom of the condition, or reduction of the risk of developing the condition, is encompassed by this term.

[0133] Administered “in combination”, as used herein, means that two (or more) different treatments are delivered to the subject during the course of the subject's affliction with the disorder, e.g., the two or more treatments are delivered after the subject has been diagnosed with the disorder and before the disorder has been cured or eliminated or treatment has ceased for other reasons. In some embodiments, the delivery of one treatment is still occurring when the delivery of the second begins, so that there is overlap in terms of administration. This is sometimes referred to herein as “simultaneous” or “concurrent delivery”. In other embodiments, the delivery of one treatment ends before the delivery of the other treatment begins. In some embodiments of either case, the treatment is more effective because of combined administration. For example, the second treatment is more effective, e.g., an equivalent effect is seen with less of the second treatment, or the second treatment reduces symptoms to a greater extent, than would be seen if the second treatment were administered in the absence of the first treatment, or the analogous situation is seen with the first treatment. In some embodiments, delivery is such that the reduction in a symptom, or other parameter related to the disorder is greater than what would be observed with one treatment delivered in the absence of the other. The effect of the two treatments can be partially additive, wholly additive, or greater than additive. The delivery can be such that an effect of the first treatment delivered is still detectable when the second is delivered. In one embodiment, the CAR-expressing cell is administered at a dose and/or dosing schedule described herein, and the B-cell inhibitor, or agent that enhances the activity of the CD19 CAR-expressing cell is administered at a dose and/or dosing schedule described herein.

[0134] “Derived from” as that term is used herein, indicates a relationship between a first and a second molecule. It generally refers to structural similarity between the first molecule and a second molecule and does not connote or include a process or source limitation on a first molecule that is derived from a second molecule. For example, in the case of an intracellular signaling domain that is derived from a CD3zeta molecule, the intracellular signaling domain retains sufficient CD3zeta structure such that is has the required function, namely, the ability to generate a signal under the appropriate conditions. It does not connote or include a limitation to a particular process of producing the intracellular signaling domain, e.g., it does not mean that, to provide the intracellular signaling domain, one must start with a CD3zeta sequence and delete unwanted sequence, or impose mutations, to arrive at the intracellular signaling domain.

[0135] The term “signaling domain” refers to the functional portion of a protein which acts by transmitting information within the cell to regulate cellular activity via defined signaling pathways by generating second messengers or functioning as effectors by responding to such messengers.

[0136] As used herein, the term “CD19” refers to the Cluster of Differentiation 19 protein, which is an antigenic determinant detectable on leukemia precursor cells. The human and murine amino acid and nucleic acid sequences can be found in a public database, such as GenBank, UniProt and Swiss-Prot. For example, the amino acid sequence of human CD19 can be found as UniProt/Swiss-Prot Accession No. P15391 and the nucleotide sequence encoding of the human CD19 can be found at Accession No. NM_001178098. As used herein, “CD19” includes proteins comprising mutations, e.g., point mutations, fragments, insertions, deletions and splice variants of full length wild-type CD19. CD19 is expressed on most B lineage cancers, including, e.g., acute lymphoblastic leukemia, chronic lymphocyte leukemia and non-Hodgkin lymphoma. Other cells with express CD19 are provided below in the definition of “disease associated with expression of CD19.” It is also an early marker of B cell progenitors. See, e.g., Nicholson et al. Mol. Immun. 34 (16-17): 1157-1165 (1997). In one aspect the antigen-binding portion of the CART recognizes and binds an antigen within the extracellular domain of the CD19 protein. In one aspect, the CD19 protein is expressed on a cancer cell.

[0137] The term “antibody,” as used herein, refers to a protein, or polypeptide sequence derived from an immunoglobulin molecule which specifically binds with an antigen. Antibodies can be polyclonal or monoclonal, multiple or single chain, or intact immunoglobulins, and may be derived from natural sources or from recombinant sources. Antibodies can be tetramers of immunoglobulin molecules.

[0138] The term “antibody fragment” refers to at least one portion of an antibody, that retains the ability to specifically interact with (e.g., by binding, steric hindrance, stabilizing/destabilizing, spatial distribution) an epitope of an antigen. Examples of antibody fragments include, but are not limited to, Fab, Fab′, F(ab′)2, Fv fragments, scFv antibody fragments, disulfide-linked Fvs (sdFv), a Fd fragment consisting of the VH and CH1 domains, linear antibodies, single domain antibodies such as sdAb (either VL or VH), camelid VHH domains, multi-specific antibodies formed from antibody fragments such as a bivalent fragment comprising two Fab fragments linked by a disulfide bridge at the hinge region, and an isolated CDR or other epitope binding fragments of an antibody. An antigen binding fragment can also be incorporated into single domain antibodies, maxibodies, minibodies, nanobodies, intrabodies, diabodies, triabodies, tetrabodies, v-NAR and bis-scFv (see, e.g., Hollinger and Hudson, Nature Biotechnology 23:1126-1136, 2005). Antigen binding fragments can also be grafted into scaffolds based on polypeptides such as a fibronectin type III (Fn3)(see U.S. Pat. No. 6,703,199, which describes fibronectin polypeptide minibodies).

[0139] The term “scFv” refers to a fusion protein comprising at least one antibody fragment comprising a variable region of a light chain and at least one antibody fragment comprising a variable region of a heavy chain, wherein the light and heavy chain variable regions are contiguously linked, e.g., via a synthetic linker, e.g., a short flexible polypeptide linker, and capable of being expressed as a single chain polypeptide, and wherein the scFv retains the specificity of the intact antibody from which it is derived. Unless specified, as used herein an scFv may have the VL and VH variable regions in either order, e.g., with respect to the N-terminal and C-terminal ends of the polypeptide, the scFv may comprise VL-linker-VH or may comprise VH-linker-VL.

[0140] The term “complementarity determining region” or “CDR,” as used herein, refers to the sequences of amino acids within antibody variable regions which confer antigen specificity and binding affinity. For example, in general, there are three CDRs in each heavy chain variable region (e.g., HCDR1, HCDR2, and HCDR3) and three CDRs in each light chain variable region (LCDR1, LCDR2, and LCDR3). The precise amino acid sequence boundaries of a given CDR can be determined using any of a number of well-known schemes, including those described by Kabat et al. (1991), “Sequences of Proteins of Immunological Interest,” 5th Ed. Public Health Service, National Institutes of Health, Bethesda, Md. (“Kabat” numbering scheme), Al-Lazikani et al., (1997) JMB 273, 927-948 (“Chothia” numbering scheme), or a combination thereof. Under the Kabat numbering scheme, in some embodiments, the CDR amino acid residues in the heavy chain variable domain (VH) are numbered 31-35 (HCDR1), 50-65 (HCDR2), and 95-102 (HCDR3); and the CDR amino acid residues in the light chain variable domain (VL) are numbered 24-34 (LCDR1), 50-56 (LCDR2), and 89-97 (LCDR3). Under the Chothia numbering scheme, in some embodiments, the CDR amino acids in the VH are numbered 26-32 (HCDR1), 52-56 (HCDR2), and 95-102 (HCDR3); and the CDR amino acid residues in the VL are numbered 26-32 (LCDR1), 50-52 (LCDR2), and 91-96 (LCDR3). In a combined Kabat and Chothia numbering scheme, in some embodiments, the CDRs correspond to the amino acid residues that are part of a Kabat CDR, a Chothia CDR, or both. For instance, in some embodiments, the CDRs correspond to amino acid residues 26-35 (HCDR1), 50-65 (HCDR2), and 95-102 (HCDR3) in a VH, e.g., a mammalian VH, e.g., a human VH; and amino acid residues 24-34 (LCDR1), 50-56 (LCDR2), and 89-97 (LCDR3) in a VL, e.g., a mammalian VL, e.g., a human VL.

[0141] As used herein, the term “binding domain” or “antibody molecule” refers to a protein, e.g., an immunoglobulin chain or fragment thereof, comprising at least one immunoglobulin variable domain sequence. The term “binding domain” or “antibody molecule” encompasses antibodies and antibody fragments. In an embodiment, an antibody molecule is a multispecific antibody molecule, e.g., it comprises a plurality of immunoglobulin variable domain sequences, wherein a first immunoglobulin variable domain sequence of the plurality has binding specificity for a first epitope and a second immunoglobulin variable domain sequence of the plurality has binding specificity for a second epitope. In an embodiment, a multispecific antibody molecule is a bispecific antibody molecule. A bispecific antibody has specificity for no more than two antigens. A bispecific antibody molecule is characterized by a first immunoglobulin variable domain sequence which has binding specificity for a first epitope and a second immunoglobulin variable domain sequence that has binding specificity for a second epitope.

[0142] The portion of the CAR of the invention comprising an antibody or antibody fragment thereof may exist in a variety of forms where the antigen binding domain is expressed as part of a contiguous polypeptide chain including, for example, a single domain antibody fragment (sdAb), a single chain antibody (scFv), a humanized antibody, or bispecific antibody (Harlow et al., 1999, In: Using Antibodies: A Laboratory Manual, Cold Spring Harbor Laboratory Press, NY; Harlow et al., 1989, In: Antibodies: A Laboratory Manual, Cold Spring Harbor, N.Y.; Houston et al., 1988, Proc. Natl. Acad. Sci. USA 85:5879-5883; Bird et al., 1988, Science 242:423-426). In one aspect, the antigen binding domain of a CAR composition of the invention comprises an antibody fragment. In a further aspect, the CAR comprises an antibody fragment that comprises a scFv.

[0143] The term “antibody heavy chain,” refers to the larger of the two types of polypeptide chains present in antibody molecules in their naturally occurring conformations, and which normally determines the class to which the antibody belongs.

[0144] The term “antibody light chain,” refers to the smaller of the two types of polypeptide chains present in antibody molecules in their naturally occurring conformations. Kappa (□) and lambda (□) light chains refer to the two major antibody light chain isotypes.

[0145] The term “recombinant antibody” refers to an antibody which is generated using recombinant DNA technology, such as, for example, an antibody expressed by a bacteriophage or yeast expression system. The term should also be construed to mean an antibody which has been generated by the synthesis of a DNA molecule encoding the antibody and which DNA molecule expresses an antibody protein, or an amino acid sequence specifying the antibody, wherein the DNA or amino acid sequence has been obtained using recombinant DNA or amino acid sequence technology which is available and well known in the art.

[0146] The term “antigen” or “Ag” refers to a molecule that provokes an immune response. This immune response may involve either antibody production, or the activation of specific immunologically-competent cells, or both. The skilled artisan will understand that any macromolecule, including virtually all proteins or peptides, can serve as an antigen. Furthermore, antigens can be derived from recombinant or genomic DNA. A skilled artisan will understand that any DNA, which comprises a nucleotide sequences or a partial nucleotide sequence encoding a protein that elicits an immune response therefore encodes an “antigen” as that term is used herein. Furthermore, one skilled in the art will understand that an antigen need not be encoded solely by a full length nucleotide sequence of a gene. It is readily apparent that the present invention includes, but is not limited to, the use of partial nucleotide sequences of more than one gene and that these nucleotide sequences are arranged in various combinations to encode polypeptides that elicit the desired immune response. Moreover, a skilled artisan will understand that an antigen need not be encoded by a “gene” at all. It is readily apparent that an antigen can be generated synthesized or can be derived from a biological sample, or might be macromolecule besides a polypeptide. Such a biological sample can include, but is not limited to a tissue sample, a tumor sample, a cell or a fluid with other biological components.

[0147] The terms “compete” or “cross-compete” are used interchangeably herein to refer to the ability of an antibody molecule to interfere with binding of an antibody molecule, e.g., an anti-CD19 or BCMA antibody molecule provided herein, to a target, e.g., human CD19 or BCMA. The interference with binding can be direct or indirect (e.g., through an allosteric modulation of the antibody molecule or the target). The extent to which an antibody molecule is able to interfere with the binding of another antibody molecule to the target, and therefore whether it can be said to compete, can be determined using a competition binding assay, e.g., as described herein. In some embodiments, a competition binding assay is a quantitative competition assay. In some embodiments, a first antibody molecule is said to compete for binding to the target with a second antibody molecule when the binding of the first antibody molecule to the target is reduced by 10% or more, e.g., 20% or more, 30% or more, 40% or more, 50% or more, 55% or more, 60% or more, 65% or more, 70% or more, 75% or more, 80% or more, 85% or more, 90% or more, 95% or more, 98% or more, 99% or more in a competition binding assay (e.g., a competition assay described herein).

[0148] As used herein, the term “epitope” refers to the moieties of an antigen (e.g., human CD19 or BCMA) that specifically interact with an antibody molecule. Such moieties, referred to herein as epitopic determinants, typically comprise, or are part of, elements such as amino acid side chains or sugar side chains. An epitopic determinate can be defined, e.g., by methods known in the art or disclosed herein, e.g., by crystallography or by hydrogen-deuterium exchange. At least one or some of the moieties on the antibody molecule, that specifically interact with an epitopic determinant, are typically located in a CDR(s). Typically an epitope has a specific three dimensional structural characteristics. Typically an epitope has specific charge characteristics. Some epitopes are linear epitopes while others are conformational epitopes.

[0149] The term “anti-cancer effect” refers to a biological effect which can be manifested by various means, including but not limited to, e.g., a decrease in tumor volume, a decrease in the number of cancer cells, a decrease in the number of metastases, an increase in life expectancy, decrease in cancer cell proliferation, decrease in cancer cell survival, or amelioration of various physiological symptoms associated with the cancerous condition. An “anti-cancer effect” can also be manifested by the ability of the peptides, polynucleotides, cells and antibodies described herein in prevention of the occurrence of cancer in the first place. The term “anti-tumor effect” refers to a biological effect which can be manifested by various means, including but not limited to, e.g., a decrease in tumor volume, a decrease in the number of tumor cells, a decrease in tumor cell proliferation, or a decrease in tumor cell survival.

[0150] The term “autologous” refers to any material derived from the same individual to whom it is later to be re-introduced into the individual.

[0151] The term “allogeneic” refers to any material derived from a different animal of the same species as the individual to whom the material is introduced. Two or more individuals are said to be allogeneic to one another when the genes at one or more loci are not identical. In some aspects, allogeneic material from individuals of the same species may be sufficiently unlike genetically to interact antigenically.

[0152] The term “xenogeneic” refers to a graft derived from an animal of a different species.

[0153] The term “cancer” refers to a disease characterized by the uncontrolled growth of aberrant cells. Cancer cells can spread locally or through the bloodstream and lymphatic system to other parts of the body. Examples of various cancers are described herein and include but are not limited to, breast cancer, prostate cancer, ovarian cancer, cervical cancer, skin cancer, pancreatic cancer, colorectal cancer, renal cancer, liver cancer, brain cancer, lymphoma, leukemia, lung cancer and the like. The terms “tumor” and “cancer” are used interchangeably herein, e.g., both terms encompass solid and liquid, e.g., diffuse or circulating, tumors. As used herein, the term “cancer” or “tumor” includes premalignant, as well as malignant cancers and tumors.

[0154] The terms “cancer associated antigen” or “tumor antigen” or “proliferative disorder antigen” or “antigen associated with a proliferative disorder” interchangeably refers to a molecule (typically protein, carbohydrate or lipid) that is preferentially expressed on the surface of a cancer cell, either entirely or as a fragment (e.g., MHC/peptide), in comparison to a normal cell, and which is useful for the preferential targeting of a pharmacological agent to the cancer cell. In some embodiments, a tumor antigen is a marker expressed by both normal cells and cancer cells, e.g., a lineage marker, e.g., CD19 on B cells. In certain aspects, the tumor antigens of the present invention are derived from, cancers including but not limited to primary or metastatic melanoma, thymoma, lymphoma, sarcoma, lung cancer, liver cancer, non-Hodgkin lymphoma, Hodgkin lymphoma, leukemias, uterine cancer, cervical cancer, bladder cancer, kidney cancer and adenocarcinomas such as breast cancer, prostate cancer, ovarian cancer, pancreatic cancer, and the like. In some embodiments, the tumor antigen is an antigen that is common to a specific proliferative disorder. In some embodiments, a cancer-associated antigen is a cell surface molecule that is overexpressed in a cancer cell in comparison to a normal cell, for instance, 1-fold over expression, 2-fold overexpression, 3-fold overexpression or more in comparison to a normal cell. In some embodiments, a cancer-associated antigen is a cell surface molecule that is inappropriately synthesized in the cancer cell, for instance, a molecule that contains deletions, additions or mutations in comparison to the molecule expressed on a normal cell. In some embodiments, a cancer-associated antigen will be expressed exclusively on the cell surface of a cancer cell, entirely or as a fragment (e.g., MHC/peptide), and not synthesized or expressed on the surface of a normal cell. In some embodiments, the CARs of the present invention includes CARs comprising an antigen binding domain (e.g., antibody or antibody fragment) that binds to a MHC presented peptide. Normally, peptides derived from endogenous proteins fill the pockets of Major histocompatibility complex (MHC) class I molecules, and are recognized by T cell receptors (TCRs) on CD8+T lymphocytes. The MHC class I complexes are constitutively expressed by all nucleated cells. In cancer, virus-specific and/or tumor-specific peptide/MHC complexes represent a unique class of cell surface targets for immunotherapy. TCR-like antibodies targeting peptides derived from viral or tumor antigens in the context of human leukocyte antigen (HLA)-A1 or HLA-A2 have been described (see, e.g., Sastry et al., J Virol. 2011 85(5):1935-1942; Sergeeva et al., Bood, 2011 117(16):4262-4272; Verma et al., J Immunol 2010 184(4):2156-2165; Willemsen et al., Gene Ther 2001 8(21):1601-1608; Dao et al., Sci Transl Med 2013 5(176):176ra33; Tassev et al., Cancer Gene Ther 2012 19(2):84-100). For example, TCR-like antibody can be identified from screening a library, such as a human scFv phage displayed library.

[0155] The phrase “disease associated with expression of CD19” includes, but is not limited to, a disease associated with expression of CD19 (e.g., wild-type or mutant CD19) or condition associated with cells which express, or at any time expressed, CD19 (e.g., wild-type or mutant CD19) including, e.g., proliferative diseases such as a cancer or malignancy or a precancerous condition such as a myelodysplasia, a myelodysplastic syndrome or a preleukemia; or a noncancer related indication associated with cells which express CD19. For the avoidance of doubt, a disease associated with expression of CD19 may include a condition associated with cells which do not presently express CD19, e.g., because CD19 expression has been downregulated, e.g., due to treatment with a molecule targeting CD19, e.g., a CD19 CAR, but which at one time expressed CD19. In one aspect, a cancer associated with expression of CD19 is a hematological cancer. In one aspect, the hematological cancer is a leukemia or a lymphoma. In one aspect, a cancer associated with expression of CD19 includes cancers and malignancies including, but not limited to, e.g., one or more acute leukemias including but not limited to, e.g., B-cell acute Lymphoid Leukemia (BALL), T-cell acute Lymphoid Leukemia (TALL), acute lymphoid leukemia (ALL); one or more chronic leukemias including but not limited to, e.g., chronic myelogenous leukemia (CML), Chronic Lymphoid Leukemia (CLL). Additional cancers or hematologic conditions associated with expression of CD19 comprise, but are not limited to, e.g., B cell prolymphocytic leukemia, blastic plasmacytoid dendritic cell neoplasm, Burkitt's lymphoma, diffuse large B cell lymphoma, Follicular lymphoma, Hairy cell leukemia, small cell- or a large cell-follicular lymphoma, malignant lymphoproliferative conditions, MALT lymphoma, mantle cell lymphoma (MCL), Marginal zone lymphoma, multiple myeloma, myelodysplasia and myelodysplastic syndrome, non-Hodgkin lymphoma, Hodgkin lymphoma, plasmablastic lymphoma, plasmacytoid dendritic cell neoplasm, Waldenstrom macroglobulinemia, and “preleukemia” which are a diverse collection of hematological conditions united by ineffective production (or dysplasia) of myeloid blood cells, and the like. Further diseases associated with expression of CD19 expression include, but not limited to, e.g., atypical and/or non-classical cancers, malignancies, precancerous conditions or proliferative diseases associated with expression of CD19. Non-cancer related indications associated with expression of CD19 include, but are not limited to, e.g., autoimmune disease, (e.g., lupus), inflammatory disorders (allergy and asthma) and transplantation. In some embodiments, the CD19-expressing cells express, or at any time expressed, CD19 mRNA. In an embodiment, the CD19-expressing cells produce a CD19 protein (e.g., wild-type or mutant), and the CD19 protein may be present at normal levels or reduced levels. In an embodiment, the CD19-expressing cells produced detectable levels of a CD19 protein at one point, and subsequently produced substantially no detectable CD19 protein.

[0156] The term “conservative sequence modifications” refers to amino acid modifications that do not significantly affect or alter the binding characteristics of the antibody or antibody fragment containing the amino acid sequence. Such conservative modifications include amino acid substitutions, additions and deletions. Modifications can be introduced into an antibody or antibody fragment of the invention by standard techniques known in the art, such as site-directed mutagenesis and PCR-mediated mutagenesis. Conservative amino acid substitutions are ones in which the amino acid residue is replaced with an amino acid residue having a similar side chain. Families of amino acid residues having similar side chains have been defined in the art. These families include amino acids with basic side chains (e.g., lysine, arginine, histidine), acidic side chains (e.g., aspartic acid, glutamic acid), uncharged polar side chains (e.g., glycine, asparagine, glutamine, serine, threonine, tyrosine, cysteine, tryptophan), nonpolar side chains (e.g., alanine, valine, leucine, isoleucine, proline, phenylalanine, methionine), beta-branched side chains (e.g., threonine, valine, isoleucine) and aromatic side chains (e.g., tyrosine, phenylalanine, tryptophan, histidine). Thus, one or more amino acid residues within a CAR of the invention can be replaced with other amino acid residues from the same side chain family and the altered CAR can be tested using the functional assays described herein.

[0157] The term “stimulation,” refers to a primary response induced by binding of a stimulatory molecule (e.g., a TCR/CD3 complex or CAR) with its cognate ligand (or tumor antigen in the case of a CAR) thereby mediating a signal transduction event, such as, but not limited to, signal transduction via the TCR/CD3 complex or signal transduction via the appropriate NK receptor or signaling domains of the CAR. Stimulation can mediate altered expression of certain molecules.

[0158] The term “stimulatory molecule,” refers to a molecule expressed by an immune cell, e.g., T cell, NK cell, or B cell) that provides the cytoplasmic signaling sequence(s) that regulate activation of the immune cell in a stimulatory way for at least some aspect of the immune cell signaling pathway. In one aspect, the signal is a primary signal that is initiated by, for instance, binding of a TCR/CD3 complex with an MHC molecule loaded with peptide, and which leads to mediation of a T cell response, including, but not limited to, proliferation, activation, differentiation, and the like. A primary cytoplasmic signaling sequence (also referred to as a “primary signaling domain”) that acts in a stimulatory manner may contain a signaling motif which is known as immunoreceptor tyrosine-based activation motif or ITAM. Examples of an ITAM containing cytoplasmic signaling sequence that is of particular use in the invention includes, but is not limited to, those derived from CD3 zeta, common FcR gamma (FCER1G), Fc gamma RIIa, FcR beta (Fc Epsilon Rib), CD3 gamma, CD3 delta, CD3 epsilon, CD79a, CD79b, DAP10, and DAP12. In a specific CAR of the invention, the intracellular signaling domain in any one or more CARS of the invention comprises an intracellular signaling sequence, e.g., a primary signaling sequence of CD3-zeta. In a specific CAR of the invention, the primary signaling sequence of CD3-zeta is the sequence provided as SEQ ID NO:17, or the equivalent residues from a non-human species, e.g., mouse, rodent, monkey, ape and the like. In a specific CAR of the invention, the primary signaling sequence of CD3-zeta is the sequence as provided in SEQ ID NO:43, or the equivalent residues from a non-human species, e.g., mouse, rodent, monkey, ape and the like.

[0159] The term “antigen presenting cell” or “APC” refers to an immune system cell such as an accessory cell (e.g., a B-cell, a dendritic cell, and the like) that displays a foreign antigen complexed with major histocompatibility complexes (MHC's) on its surface. T-cells may recognize these complexes using their T-cell receptors (TCRs). APCs process antigens and present them to T-cells.

[0160] “Immune effector cell,” as that term is used herein, refers to a cell that is involved in an immune response, e.g., in the promotion of an immune effector response. Examples of immune effector cells include T cells, e.g., alpha/beta T cells and gamma/delta T cells, B cells, natural killer (NK) cells, natural killer T (NK-T) cells, mast cells, and myeloid-derived phagocytes.

[0161] “Immune effector function or immune effector response,” as that term is used herein, refers to function or response, e.g., of an immune effector cell, that enhances or promotes an immune attack of a target cell. E.g., an immune effector function or response refers a property of a T or NK cell that promotes killing or the inhibition of growth or proliferation, of a target cell. In the case of a T cell, primary stimulation and co-stimulation are examples of immune effector function or response.

[0162] The term “effector function” refers to a specialized function of a cell. Effector function of a T cell, for example, may be cytolytic activity or helper activity including the secretion of cytokines.

[0163] An “intracellular signaling domain,” as the term is used herein, refers to an intracellular portion of a molecule. The intracellular signaling domain can generate a signal that promotes an immune effector function of the CAR containing cell, e.g., a CART cell. Examples of immune effector function, e.g., in a CART cell, include cytolytic activity and helper activity, including the secretion of cytokines. In embodiments, the intracellular signal domain is the portion of the protein which transduces the effector function signal and directs the cell to perform a specialized function. While the entire intracellular signaling domain can be employed, in many cases it is not necessary to use the entire chain. To the extent that a truncated portion of the intracellular signaling domain is used, such truncated portion may be used in place of the intact chain as long as it transduces the effector function signal. The term intracellular signaling domain is thus meant to include any truncated portion of the intracellular signaling domain sufficient to transduce the effector function signal.

[0164] In an embodiment, the intracellular signaling domain can comprise a primary intracellular signaling domain. Exemplary primary intracellular signaling domains include those derived from the molecules responsible for primary stimulation, or antigen dependent simulation. In an embodiment, the intracellular signaling domain can comprise a costimulatory intracellular domain. Exemplary costimulatory intracellular signaling domains include those derived from molecules responsible for costimulatory signals, or antigen independent stimulation. For example, in the case of a CART, a primary intracellular signaling domain can comprise a cytoplasmic sequence of a T cell receptor, and a costimulatory intracellular signaling domain can comprise cytoplasmic sequence from co-receptor or costimulatory molecule.

[0165] A primary intracellular signaling domain can comprise a signaling motif which is known as an immunoreceptor tyrosine-based activation motif or ITAM. Examples of ITAM containing primary cytoplasmic signaling sequences include, but are not limited to, those derived from CD3 zeta, FcR gamma, common FcR gamma (FCER1G), Fc gamma RIIa, FcR beta (Fc Epsilon Rib), CD3 gamma, CD3 delta, CD3 epsilon, CD22, CD79a, CD79b, CD278 (“ICOS”), FcεRI, CD66d, CD32, DAP10 and DAP12.

[0166] The term “zeta” or alternatively “zeta chain”, “CD3-zeta” or “TCR-zeta” is defined as the protein provided as GenBank Acc. No. BAG36664.1, or the equivalent residues from a non-human species, e.g., mouse, rodent, monkey, ape and the like, and a “zeta stimulatory domain” or alternatively a “CD3-zeta stimulatory domain” or a “TCR-zeta stimulatory domain” is defined as the amino acid residues from the cytoplasmic domain of the zeta chain, or functional derivatives thereof, that are sufficient to functionally transmit an initial signal necessary for T cell activation. In one aspect the cytoplasmic domain of zeta comprises residues 52 through 164 of GenBank Acc. No. BAG36664.1 or the equivalent residues from a non-human species, e.g., mouse, rodent, monkey, ape and the like, that are functional orthologs thereof. In one aspect, the “zeta stimulatory domain” or a “CD3-zeta stimulatory domain” is the sequence provided as SEQ ID NO:17. In one aspect, the “zeta stimulatory domain” or a “CD3-zeta stimulatory domain” is the sequence provided as SEQ ID NO:43.

[0167] The term “costimulatory molecule” refers to the cognate binding partner on a T cell that specifically binds with a costimulatory ligand, thereby mediating a costimulatory response by the T cell, such as, but not limited to, proliferation. Costimulatory molecules are cell surface molecules other than antigen receptors or their ligands that contribute to an efficient immune response. Costimulatory molecules include, but are not limited to an MHC class I molecule, TNF receptor proteins, Immunoglobulin-like proteins, cytokine receptors, integrins, signalling lymphocytic activation molecules (SLAM proteins), activating NK cell receptors, BTLA, a Toll ligand receptor, OX40, CD2, CD7, CD27, CD28, CD30, CD40, CDS, ICAM-1, LFA-1 (CD11a/CD18), 4-1BB (CD137), B7-H3, CDS, ICAM-1, ICOS (CD278), GITR, BAFFR, LIGHT, HVEM (LIGHTR), KIRDS2, SLAMF7, NKp80 (KLRF1), NKp44, NKp30, NKp46, CD19, CD4, CD8alpha, CD8beta, IL2R beta, IL2R gamma, IL7R alpha, ITGA4, VLA1, CD49a, ITGA4, IA4, CD49D, ITGA6, VLA-6, CD49f, ITGAD, CD11d, ITGAE, CD103, ITGAL, CD11a, LFA-1, ITGAM, CD11b, ITGAX, CD11c, ITGB1, CD29, ITGB2, CD18, LFA-1, ITGB7, NKG2D, NKG2C, TNFR2, TRANCE/RANKL, DNAM1 (CD226), SLAMF4 (CD244, 2B4), CD84, CD96 (Tactile), CEACAM1, CRTAM, Ly9 (CD229), CD160 (BY55), PSGL1, CD100 (SEMA4D), CD69, SLAMF6 (NTB-A, Ly108), SLAM (SLAMF1, CD150, IPO-3), BLAME (SLAMF8), SELPLG (CD162), LTBR, LAT, GADS, SLP-76, PAG/Cbp, CD19a, and a ligand that specifically binds with CD83.

[0168] A costimulatory intracellular signaling domain refers to the intracellular portion of a costimulatory molecule. The intracellular signaling domain can comprise the entire intracellular portion, or the entire native intracellular signaling domain, of the molecule from which it is derived, or a functional fragment or derivative thereof.

[0169] The term “4-1BB” refers to a member of the TNFR superfamily with an amino acid sequence provided as GenBank Acc. No. AAA62478.2, or the equivalent residues from a non-human species, e.g., mouse, rodent, monkey, ape and the like; and a “4-1BB costimulatory domain” is defined as amino acid residues 214-255 of GenBank Acc. No. AAA62478.2, or the equivalent residues from a non-human species, e.g., mouse, rodent, monkey, ape and the like. In one aspect, the “4-1BB costimulatory domain” is the sequence provided as SEQ ID NO:16 or the equivalent residues from a non-human species, e.g., mouse, rodent, monkey, ape and the like.

[0170] The term “encoding” refers to the inherent property of specific sequences of nucleotides in a polynucleotide, such as a gene, a cDNA, or an mRNA, to serve as templates for synthesis of other polymers and macromolecules in biological processes having either a defined sequence of nucleotides (e.g., rRNA, tRNA and mRNA) or a defined sequence of amino acids and the biological properties resulting therefrom. Thus, a gene, cDNA, or RNA, encodes a protein if transcription and translation of mRNA corresponding to that gene produces the protein in a cell or other biological system. Both the coding strand, the nucleotide sequence of which is identical to the mRNA sequence and is usually provided in sequence listings, and the non-coding strand, used as the template for transcription of a gene or cDNA, can be referred to as encoding the protein or other product of that gene or cDNA.

[0171] Unless otherwise specified, a “nucleotide sequence encoding an amino acid sequence” includes all nucleotide sequences that are degenerate versions of each other and that encode the same amino acid sequence. The phrase nucleotide sequence that encodes a protein or a RNA may also include introns to the extent that the nucleotide sequence encoding the protein may in some version contain an intron(s).

[0172] The term “effective amount” or “therapeutically effective amount” are used interchangeably herein, and refer to an amount of a compound, formulation, material, or composition, as described herein effective to achieve a particular biological result.

[0173] The term “endogenous” refers to any material from or produced inside an organism, cell, tissue or system.

[0174] The term “exogenous” refers to any material introduced from or produced outside an organism, cell, tissue or system.

[0175] The term “expression” refers to the transcription and/or translation of a particular nucleotide sequence driven by a promoter.

[0176] The term “transfer vector” refers to a composition of matter which comprises an isolated nucleic acid and which can be used to deliver the isolated nucleic acid to the interior of a cell. Numerous vectors are known in the art including, but not limited to, linear polynucleotides, polynucleotides associated with ionic or amphiphilic compounds, plasmids, and viruses. Thus, the term “transfer vector” includes an autonomously replicating plasmid or a virus. The term should also be construed to further include non-plasmid and non-viral compounds which facilitate transfer of nucleic acid into cells, such as, for example, a polylysine compound, liposome, and the like. Examples of viral transfer vectors include, but are not limited to, adenoviral vectors, adeno-associated virus vectors, retroviral vectors, lentiviral vectors, and the like.

[0177] The term “expression vector” refers to a vector comprising a recombinant polynucleotide comprising expression control sequences operatively linked to a nucleotide sequence to be expressed. An expression vector comprises sufficient cis-acting elements for expression; other elements for expression can be supplied by the host cell or in an in vitro expression system. Expression vectors include all those known in the art, including cosmids, plasmids (e.g., naked or contained in liposomes) and viruses (e.g., lentiviruses, retroviruses, adenoviruses, and adeno-associated viruses) that incorporate the recombinant polynucleotide.

[0178] The term “lentivirus” refers to a genus of the Retroviridae family. Lentiviruses are unique among the retroviruses in being able to infect non-dividing cells; they can deliver a significant amount of genetic information into the DNA of the host cell, so they are one of the most efficient methods of a gene delivery vector. HIV, SIV, and FIV are all examples of lentiviruses.

[0179] The term “lentiviral vector” refers to a vector derived from at least a portion of a lentivirus genome, including especially a self-inactivating lentiviral vector as provided in Milone et al., Mol. Ther. 17(8): 1453-1464 (2009). Other examples of lentivirus vectors that may be used in the clinic, include but are not limited to, e.g., the LENTIVECTOR® gene delivery technology from Oxford BioMedica, the LENTIMAX™ vector system from Lentigen and the like. Nonclinical types of lentiviral vectors are also available and would be known to one skilled in the art.

[0180] The term “homologous” or “identity” refers to the subunit sequence identity between two polymeric molecules, e.g., between two nucleic acid molecules, such as, two DNA molecules or two RNA molecules, or between two polypeptide molecules. When a subunit position in both of the two molecules is occupied by the same monomeric subunit; e.g., if a position in each of two DNA molecules is occupied by adenine, then they are homologous or identical at that position. The homology between two sequences is a direct function of the number of matching or homologous positions; e.g., if half (e.g., five positions in a polymer ten subunits in length) of the positions in two sequences are homologous, the two sequences are 50% homologous; if 90% of the positions (e.g., 9 of 10), are matched or homologous, the two sequences are 90% homologous.

[0181] “Humanized” forms of non-human (e.g., murine) antibodies are chimeric immunoglobulins, immunoglobulin chains or fragments thereof (such as Fv, Fab, Fab′, F(ab′)2 or other antigen-binding subsequences of antibodies) which contain minimal sequence derived from non-human immunoglobulin. For the most part, humanized antibodies and antibody fragments thereof are human immunoglobulins (recipient antibody or antibody fragment) in which residues from a complementary-determining region (CDR) of the recipient are replaced by residues from a CDR of a non-human species (donor antibody) such as mouse, rat or rabbit having the desired specificity, affinity, and capacity. In some instances, Fv framework region (FR) residues of the human immunoglobulin are replaced by corresponding non-human residues. Furthermore, a humanized antibody/antibody fragment can comprise residues which are found neither in the recipient antibody nor in the imported CDR or framework sequences. These modifications can further refine and optimize antibody or antibody fragment performance. In general, the humanized antibody or antibody fragment thereof will comprise substantially all of at least one, and typically two, variable domains, in which all or substantially all of the CDR regions correspond to those of a non-human immunoglobulin and all or a significant portion of the FR regions are those of a human immunoglobulin sequence. The humanized antibody or antibody fragment can also comprise at least a portion of an immunoglobulin constant region (Fc), typically that of a human immunoglobulin. For further details, see Jones et al., Nature, 321: 522-525, 1986; Reichmann et al., Nature, 332: 323-329, 1988; Presta, Curr. Op. Struct. Biol., 2: 593-596, 1992.

[0182] “Fully human” refers to an immunoglobulin, such as an antibody or antibody fragment, where the whole molecule is of human origin or consists of an amino acid sequence identical to a human form of the antibody or immunoglobulin.

[0183] The term “isolated” means altered or removed from the natural state. For example, a nucleic acid or a peptide naturally present in a living animal is not “isolated,” but the same nucleic acid or peptide partially or completely separated from the coexisting materials of its natural state is “isolated.” An isolated nucleic acid or protein can exist in substantially purified form, or can exist in a non-native environment such as, for example, a host cell.

[0184] In the context of the present invention, the following abbreviations for the commonly occurring nucleic acid bases are used. “A” refers to adenosine, “C” refers to cytosine, “G” refers to guanosine, “T” refers to thymidine, and “U” refers to uridine.

[0185] The term “operably linked” or “transcriptional control” refers to functional linkage between a regulatory sequence and a heterologous nucleic acid sequence resulting in expression of the latter. For example, a first nucleic acid sequence is operably linked with a second nucleic acid sequence when the first nucleic acid sequence is placed in a functional relationship with the second nucleic acid sequence. For instance, a promoter is operably linked to a coding sequence if the promoter affects the transcription or expression of the coding sequence. Operably linked DNA sequences can be contiguous with each other and, e.g., where necessary to join two protein coding regions, are in the same reading frame.

[0186] The term “parenteral” administration of an immunogenic composition includes, e.g., subcutaneous (s.c.), intravenous (i.v.), intramuscular (i.m.), or intrasternal injection, intratumoral, or infusion techniques.

[0187] The term “nucleic acid” or “polynucleotide” refers to deoxyribonucleic acids (DNA) or ribonucleic acids (RNA) and polymers thereof in either single- or double-stranded form. The term “nucleic acid” includes a gene, cDNA, or an mRNA. In one embodiment, the nucleic acid molecule is synthetic (e.g., chemically synthesized) or recombinant. Unless specifically limited, the term encompasses nucleic acids containing analogues or derivatives of natural nucleotides that have similar binding properties as the reference nucleic acid and are metabolized in a manner similar to naturally occurring nucleotides. Unless otherwise indicated, a particular nucleic acid sequence also implicitly encompasses conservatively modified variants thereof (e.g., degenerate codon substitutions), alleles, orthologs, SNPs, and complementary sequences as well as the sequence explicitly indicated. Specifically, degenerate codon substitutions may be achieved by generating sequences in which the third position of one or more selected (or all) codons is substituted with mixed-base and/or deoxyinosine residues (Batzer et al., Nucleic Acid Res. 19:5081 (1991); Ohtsuka et al., J. Biol. Chem. 260:2605-2608 (1985); and Rossolini et al., Mol. Cell. Probes 8:91-98 (1994)).

[0188] The terms “peptide,” “polypeptide,” and “protein” are used interchangeably, and refer to a compound comprised of amino acid residues covalently linked by peptide bonds. A protein or peptide must contain at least two amino acids, and no limitation is placed on the maximum number of amino acids that can comprise a protein's or peptide's sequence. Polypeptides include any peptide or protein comprising two or more amino acids joined to each other by peptide bonds. As used herein, the term refers to both short chains, which also commonly are referred to in the art as peptides, oligopeptides and oligomers, for example, and to longer chains, which generally are referred to in the art as proteins, of which there are many types. “Polypeptides” include, for example, biologically active fragments, substantially homologous polypeptides, oligopeptides, homodimers, heterodimers, variants of polypeptides, modified polypeptides, derivatives, analogs, fusion proteins, among others. A polypeptide includes a natural peptide, a recombinant peptide, or a combination thereof.

[0189] As used herein, the term “plurality” refers to two or more.

[0190] The term “promoter” refers to a DNA sequence recognized by the synthetic machinery of the cell, or introduced synthetic machinery, required to initiate the specific transcription of a polynucleotide sequence.

[0191] The term “promoter/regulatory sequence” refers to a nucleic acid sequence which is required for expression of a gene product operably linked to the promoter/regulatory sequence. In some instances, this sequence may be the core promoter sequence and in other instances, this sequence may also include an enhancer sequence and other regulatory elements which are required for expression of the gene product. The promoter/regulatory sequence may, for example, be one which expresses the gene product in a tissue specific manner.

[0192] The term “constitutive” promoter refers to a nucleotide sequence which, when operably linked with a polynucleotide which encodes or specifies a gene product, causes the gene product to be produced in a cell under most or all physiological conditions of the cell.

[0193] The term “inducible” promoter refers to a nucleotide sequence which, when operably linked with a polynucleotide which encodes or specifies a gene product, causes the gene product to be produced in a cell substantially only when an inducer which corresponds to the promoter is present in the cell.

[0194] The term “tissue-specific” promoter refers to a nucleotide sequence which, when operably linked with a polynucleotide encodes or specified by a gene, causes the gene product to be produced in a cell substantially only if the cell is a cell of the tissue type corresponding to the promoter.

[0195] The term “flexible polypeptide linker” or “linker” as used in the context of a scFv refers to a peptide linker that consists of amino acids such as glycine and/or serine residues used alone or in combination, to link variable heavy and variable light chain regions together. In one embodiment, the flexible polypeptide linker is a Gly/Ser linker and comprises the amino acid sequence (Gly-Gly-Gly-Ser)n, where n is a positive integer equal to or greater than 1. For example, n=1, n=2, n=3. n=4, n=5, n=6, n=7, n=8, n=9 and n=10 (SEQ ID NO:105). In one embodiment, the flexible polypeptide linkers include, but are not limited to, (Gly4 Ser)4 (SEQ ID NO:106) or (Gly4 Ser)3 (SEQ ID NO:107). In another embodiment, the linkers include multiple repeats of (Gly2Ser), (GlySer) or (Gly3Ser) (SEQ ID NO:108). Also included within the scope of the invention are linkers described in WO2012/138475, incorporated herein by reference.

[0196] As used herein, a 5′ cap (also termed an RNA cap, an RNA 7-methylguanosine cap or an RNA m⁷G cap) is a modified guanine nucleotide that has been added to the “front” or 5′ end of a eukaryotic messenger RNA shortly after the start of transcription. The 5′ cap consists of a terminal group which is linked to the first transcribed nucleotide. Its presence is important for recognition by the ribosome and protection from RNases. Cap addition is coupled to transcription, and occurs co-transcriptionally, such that each influences the other. Shortly after the start of transcription, the 5′ end of the mRNA being synthesized is bound by a cap-synthesizing complex associated with RNA polymerase. This enzymatic complex catalyzes the chemical reactions that are required for mRNA capping. Synthesis proceeds as a multi-step biochemical reaction. The capping moiety can be modified to modulate functionality of mRNA such as its stability or efficiency of translation.

[0197] As used herein, “in vitro transcribed RNA” refers to RNA, e.g., mRNA, that has been synthesized in vitro. Generally, the in vitro transcribed RNA is generated from an in vitro transcription vector. The in vitro transcription vector comprises a template that is used to generate the in vitro transcribed RNA.

[0198] As used herein, a “poly(A)” is a series of adenosines attached by polyadenylation to the mRNA. In some embodiments of a construct for transient expression, the polyA is between 50 and 5000 (SEQ ID NO: 28), e.g., greater than 64, e.g., greater than 100, e.g., than 300 or 400. Poly(A) sequences can be modified chemically or enzymatically to modulate mRNA functionality such as localization, stability or efficiency of translation.

[0199] As used herein, “polyadenylation” refers to the covalent linkage of a polyadenylyl moiety, or its modified variant, to a messenger RNA molecule. In eukaryotic organisms, most messenger RNA (mRNA) molecules are polyadenylated at the 3′ end. The 3′ poly(A) tail is a long sequence of adenine nucleotides (often several hundred) added to the pre-mRNA through the action of an enzyme, polyadenylate polymerase. In higher eukaryotes, the poly(A) tail is added onto transcripts that contain a specific sequence, the polyadenylation signal. The poly(A) tail and the protein bound to it aid in protecting mRNA from degradation by exonucleases. Polyadenylation is also important for transcription termination, export of the mRNA from the nucleus, and translation. Polyadenylation occurs in the nucleus immediately after transcription of DNA into RNA, but additionally can also occur later in the cytoplasm. After transcription has been terminated, the mRNA chain is cleaved through the action of an endonuclease complex associated with RNA polymerase. The cleavage site is usually characterized by the presence of the base sequence AAUAAA near the cleavage site. After the mRNA has been cleaved, adenosine residues are added to the free 3′ end at the cleavage site.

[0200] As used herein, “transient” refers to expression of a non-integrated transgene for a period of hours, days or weeks, wherein the period of time of expression is less than the period of time for expression of the gene if integrated into the genome or contained within a stable plasmid replicon in the host cell.

[0201] The term “signal transduction pathway” refers to the biochemical relationship between a variety of signal transduction molecules that play a role in the transmission of a signal from one portion of a cell to another portion of a cell. The phrase “cell surface receptor” includes molecules and complexes of molecules capable of receiving a signal and transmitting signal across the membrane of a cell.

[0202] The term “subject” is intended to include living organisms in which an immune response can be elicited (e.g., mammals, human).

[0203] The term, a “substantially purified” cell refers to a cell that is essentially free of other cell types. A substantially purified cell also refers to a cell which has been separated from other cell types with which it is normally associated in its naturally occurring state. In some instances, a population of substantially purified cells refers to a homogenous population of cells. In other instances, this term refers simply to cell that have been separated from the cells with which they are naturally associated in their natural state. In some aspects, the cells are cultured in vitro. In other aspects, the cells are not cultured in vitro.

[0204] The term “therapeutic” as used herein means a treatment. A therapeutic effect is obtained by reduction, suppression, remission, or eradication of a disease state.

[0205] The term “prophylaxis” as used herein means the prevention of or protective treatment for a disease or disease state.

[0206] In the context of the present invention, “tumor antigen” or “hyperproliferative disorder antigen” or “antigen associated with a hyperproliferative disorder” refers to antigens that are common to specific hyperproliferative disorders. In certain aspects, the hyperproliferative disorder antigens of the present invention are derived from, cancers including but not limited to primary or metastatic melanoma, thymoma, lymphoma, sarcoma, lung cancer, liver cancer, non-Hodgkin lymphoma, Hodgkin lymphoma, leukemias, uterine cancer, cervical cancer, bladder cancer, kidney cancer and adenocarcinomas such as breast cancer, prostate cancer, ovarian cancer, pancreatic cancer, and the like.

[0207] The term “transfected” or “transformed” or “transduced” refers to a process by which exogenous nucleic acid is transferred or introduced into the host cell. A “transfected” or “transformed” or “transduced” cell is one which has been transfected, transformed or transduced with exogenous nucleic acid. The cell includes the primary subject cell and its progeny.

[0208] A subject “responds” to treatment if a parameter of a cancer (e.g., a hematological cancer, e.g., cancer cell growth, proliferation and/or survival) in the subject is retarded or reduced by a detectable amount, e.g., about 5%, 10%, 20%, 30%, 40%, 50%, 60%, 70%, 80%, 90% or more as determined by any appropriate measure, e.g., by mass, cell count or volume. In one example, a subject responds to treatment if the subject experiences a life expectancy extended by about 5%, 10%, 20%, 30%, 40%, 50% or more beyond the life expectancy predicted if no treatment is administered. In another example, a subject responds to treatment, if the subject has an increased disease-free survival, overall survival or increased time to progression. Several methods can be used to determine if a patient responds to a treatment including, for example, criteria provided by NCCN Clinical Practice Guidelines in Oncology (NCCN Guidelines®). For example, in the context of B-ALL, a complete response or complete responder, may involve one or more of: <5% BM blast, >1000 neutrophil/ANC (/μL). >100,000 platelets (/μL) with no circulating blasts or extramedullary disease (no lymphadenopathy, splenomegaly, skin/gum infiltration/testicular mass/CNS involvement), Trilineage hematopoiesis, and no recurrence for 4 weeks. A partial responder may involve one or more of >50% reduction in BM blast, >1000 neutrophil/ANC (/μL). >100,000 platelets (/μL). A non-responder can show disease progression, e.g., >25% in BM blasts.

[0209] “Refractory” as used herein refers to a disease, e.g., cancer, that does not respond to a treatment. In embodiments, a refractory cancer can be resistant to a treatment before or at the beginning of the treatment. In other embodiments, the refractory cancer can become resistant during a treatment. A refractory cancer is also called a resistant cancer.

[0210] The term “relapse” as used herein refers to reappearance of a cancer after an initial period of responsiveness (e.g., complete response or partial response). The initial period of responsiveness may involve the level of cancer cells falling below a certain threshold, e.g., below 20%, 1%, 10%, 5%, 4%, 3%, 2%, or 1%. The reappearance may involve the level of cancer cells rising above a certain threshold, e.g., above 20%, 1%, 10%, 5%, 4%, 3%, 2%, or 1%. For example, e.g., in the context of B-ALL, the reappearance may involve, e.g., a reappearance of blasts in the blood, bone marrow (>5%), or any extramedullary site, after a complete response. A complete response, in this context, may involve <5% BM blast. More generally, in an embodiment, a response (e.g., complete response or partial response) can involve the absence of detectable MRD (minimal residual disease). In an embodiment, the initial period of responsiveness lasts at least 1, 2, 3, 4, 5, or 6 days; at least 1, 2, 3, or 4 weeks; at least 1, 2, 3, 4, 6, 8, 10, or 12 months; or at least 1, 2, 3, 4, or 5 years.

[0211] In some embodiments, a therapy that includes a CD19 inhibitor, e.g., a CD19 CAR therapy, may relapse or be refractory to treatment. The relapse or resistance can be caused by CD19 loss (e.g., an antigen loss mutation) or other CD19 alteration that reduces the level of CD19 (e.g., caused by clonal selection of CD19-negative clones). A cancer that harbors such CD19 loss or alteration is referred to herein as a “CD19-negative cancer” or a “CD19-negative relapsed cancer”). It shall be understood that a CD19-negative cancer need not have 100% loss of CD19, but a sufficient reduction to reduce the effectiveness of a CD19 therapy such that the cancer relapses or becomes refractory. In some embodiments, a CD19-negative cancer results from a CD19 CAR therapy.

[0212] The term “specifically binds,” refers to an antibody, or a ligand, which recognizes and binds with a binding partner (e.g., a stimulatory tumor antigen) protein present in a sample, but which antibody or ligand does not substantially recognize or bind other molecules in the sample.

[0213] As used herein, the term “pharmaceutically acceptable salt” refers to those salts which are, within the scope of sound medical judgment, suitable for use in contact with the tissues of subjects without undue toxicity, irritation, allergic response and the like, and are commensurate with a reasonable benefit/risk ratio. Pharmaceutically acceptable salts are well known in the art. For example, Berge et al. describes pharmaceutically acceptable salts in detail in J. Pharmaceutical Sciences (1977) 66:1-19.

[0214] “Regulatable chimeric antigen receptor (RCAR),” as that term is used herein, refers to a set of polypeptides, typically two in the simplest embodiments, which when in a RCARX cell, provides the RCARX cell with specificity for a target cell, typically a cancer cell, and with regulatable intracellular signal generation or proliferation, which can optimize an immune effector property of the RCARX cell. An RCARX cell relies at least in part, on an antigen binding domain to provide specificity to a target cell that comprises the antigen bound by the antigen binding domain. In an embodiment, an RCAR includes a dimerization switch that, upon the presence of a dimerization molecule, can couple an intracellular signaling domain to the antigen binding domain.

[0215] “Membrane anchor” or “membrane tethering domain”, as that term is used herein, refers to a polypeptide or moiety, e.g., a myristoyl group, sufficient to anchor an extracellular or intracellular domain to the plasma membrane.

[0216] “Switch domain,” as that term is used herein, e.g., when referring to an RCAR, refers to an entity, typically a polypeptide-based entity, that, in the presence of a dimerization molecule, associates with another switch domain. The association results in a functional coupling of a first entity linked to, e.g., fused to, a first switch domain, and a second entity linked to, e.g., fused to, a second switch domain. A first and second switch domain are collectively referred to as a dimerization switch. In embodiments, the first and second switch domains are the same as one another, e.g., they are polypeptides having the same primary amino acid sequence, and are referred to collectively as a homodimerization switch. In embodiments, the first and second switch domains are different from one another, e.g., they are polypeptides having different primary amino acid sequences, and are referred to collectively as a heterodimerization switch. In embodiments, the switch is intracellular. In embodiments, the switch is extracellular. In embodiments, the switch domain is a polypeptide-based entity, e.g., FKBP or FRB-based, and the dimerization molecule is small molecule, e.g., a rapalogue. In embodiments, the switch domain is a polypeptide-based entity, e.g., an scFv that binds a myc peptide, and the dimerization molecule is a polypeptide, a fragment thereof, or a multimer of a polypeptide, e.g., a myc ligand or multimers of a myc ligand that bind to one or more myc scFvs. In embodiments, the switch domain is a polypeptide-based entity, e.g., myc receptor, and the dimerization molecule is an antibody or fragments thereof, e.g., myc antibody.

[0217] “Dimerization molecule,” as that term is used herein, e.g., when referring to an RCAR, refers to a molecule that promotes the association of a first switch domain with a second switch domain. In embodiments, the dimerization molecule does not naturally occur in the subject, or does not occur in concentrations that would result in significant dimerization. In embodiments, the dimerization molecule is a small molecule, e.g., rapamycin or a rapalogue, e.g., RAD001.

[0218] The term “low, immune enhancing, dose” when used in conjunction with an mTOR inhibitor, e.g., an allosteric mTOR inhibitor, e.g., RAD001 or rapamycin, or a catalytic mTOR inhibitor, refers to a dose of mTOR inhibitor that partially, but not fully, inhibits mTOR activity, e.g., as measured by the inhibition of P70 S6 kinase activity. Methods for evaluating mTOR activity, e.g., by inhibition of P70 S6 kinase, are discussed herein. The dose is insufficient to result in complete immune suppression but is sufficient to enhance the immune response. In an embodiment, the low, immune enhancing, dose of mTOR inhibitor results in a decrease in the number of PD-1 positive T cells and/or an increase in the number of PD-1 negative T cells, or an increase in the ratio of PD-1 negative T cells/PD-1 positive T cells. In an embodiment, the low, immune enhancing, dose of mTOR inhibitor results in an increase in the number of naive T cells. In an embodiment, the low, immune enhancing, dose of mTOR inhibitor results in one or more of the following:
[0219] an increase in the expression of one or more of the following markers: CD62L^{high}, CD127^{high}, CD27⁺, and BCL2, e.g., on memory T cells, e.g., memory T cell precursors;
[0220] a decrease in the expression of KLRG1, e.g., on memory T cells, e.g., memory T cell precursors; and
[0221] an increase in the number of memory T cell precursors, e.g., cells with any one or combination of the following characteristics: increased CD62L^{high}, increased CD127^{high}, increased CD27⁺, decreased KLRG1, and increased BCL2;
   wherein any of the changes described above occurs, e.g., at least transiently, e.g., as compared to a non-treated subject.

[0222] Ranges: throughout this disclosure, various aspects of the invention can be presented in a range format. It should be understood that the description in range format is merely for convenience and brevity and should not be construed as an inflexible limitation on the scope of the invention. Accordingly, the description of a range should be considered to have specifically disclosed all the possible subranges as well as individual numerical values within that range. For example, description of a range such as from 1 to 6 should be considered to have specifically disclosed subranges such as from 1 to 3, from 1 to 4, from 1 to 5, from 2 to 4, from 2 to 6, from 3 to 6 etc., as well as individual numbers within that range, for example, 1, 2, 2.7, 3, 4, 5, 5.3, and 6. As another example, a range such as 95-99% identity, includes something with 95%, 96%, 97%, 98% or 99% identity, and includes subranges such as 96-99%, 96-98%, 96-97%, 97-99%, 97-98% and 98-99% identity. This applies regardless of the breadth of the range.

### DESCRIPTION

[0223] Chimeric antigen receptor-engineered T-cell (CAR T) therapy has shown promise in the treatment of certain cancers, e.g., hematological cancers. CAR-T therapy can be optimized using approaches that include alterations to dosing, e.g., therapeutic, regimens, e.g., as described herein. The present disclosure provides, inter alia, dosing regimens that can, e.g., improve the efficacy or CAR-T therapy and/or reduce side effects associated with CAR-T therapy.

[0224] Provided herein, inter alia, is a method of treating a subject with a CAR-expressing cell therapy, e.g., a CD19 CAR expressing cell therapy, comprising administering to the subject a CAR-expressing cell therapy, e.g., a CAR19 expressing cell therapy, wherein the CAR-expressing cell therapy is administered less than 30 days, e.g., less than 29, 28, 27, 26, 25, 24, 23, 22, 21, 20, 19, 18, 17, 16, 15, 14, 13, 12, 11, 10, 9, 8, 7, 6, 5, 4, 3, 2, or 1 days, after administration of a lymphodepleting therapy comprising radiotherapy. Also provided herein, is a method of treating, e.g., preventing, cytokine release syndrome (CRS) with a CAR-expressing cell therapy, e.g., a CAR19 expressing cell therapy, in a subject in need thereof, comprising administering to the subject a lymphodepleting therapy comprising radiotherapy, thereby preventing CRS in the subject. Furthermore, the disclosure provides a method of treating a subject comprising administering to the subject a CAR-expressing cell therapy, e.g., a CAR19 expressing cell therapy, wherein the CAR-expressing cell therapy is administered after stem cell therapy (SCT), e.g., autologous SCT or allogeneic SCT, wherein the subject has not responded, e.g., relapsed, to the SCT, thereby treating the subject. In some embodiments, wherein the CAR-expressing cell therapy is administered after relapse from SCT therapy, e.g., about 1-6 months (e.g., about 1.1-1.5, 1.5-2.0, 2.0-2.5, 2.5-3, 3-3.5, 3.5-4, 4-4.5. 4.5-5, 5-5.5, or 5.5-6 months) after relapse. Additional features of the methods of treatment disclosed herein are described in further detail below. Also disclosed herein are CAR-expressing cell therapies, e.g., CAR19 expressing cell therapy, and methods of making and using the same.

### Stem Cell Therapy

[0225] Stem cell therapy as used herein is also referred to as stem cell transplantation. In one aspect, the disclosure provides a method of treating a subject with a CAR-expressing cell therapy in combination with stem cell therapy (SCT), e.g., autologous SCT or allogeneic SCT. In some embodiments, the SCT is administered prior to administration of the CAR-expressing cell therapy. In some embodiments, the CAR-expressing cell therapy is administered, after relapse from SCT, e.g., about 1-12 months, e.g., about 1-3, 3-6, 6-9, or 9-12 months, after relapse. In some embodiments, the SCT is administered, after relapse from SCT, e.g., about 1-6 months (e.g., about 1.1-1.5, 1.5-2.0, 2.0-2.5, 2.5-3, 3-3.5, 3.5-4, 4-4.5. 4.5-5, 5-5.5, or 5.5-6 months) after relapse. In some embodiments, the subject is a pediatric subject, e.g., as described herein, and the subject has a hematological cancer, e.g., ALL, e.g., B-ALL, e.g., relapsed and/or refractory B-ALL. In some embodiments, the subject is an adolescent, e.g., as described herein, and the subject has a hematolological cancer, e.g., ALL, e.g., B-ALL, e.g., relapsed and/or refractory B-ALL. In some embodiments, the subject is a young adult, e.g., as described herein and the subject has ALL, e.g., B-ALL. In some embodiments, the subject has NHL, e.g., relapsed and/or refractory NHL.

[0226] In some embodiments, SCT comprises administration of cells, e.g., hematopoietic cells, e.g., hematopoietic stem cells. In some embodiments, the cells, e.g., hematopoietic cells, e.g., HSCs, are derived, e.g., obtained, from bone marrow, cord blood, or peripheral blood.

### Radiotherapy

[0227] Radiotherapy as used herein is also referred to a radiation therapy (RT). In some embodiments, radiotherapy is used as a lymphodepleting therapy. In some embodiments, the dose of radiotherapy used is a low dose radiotherapy. In some embodiments, the dose of radiotherapy used is a high dose radiotherapy.

[0228] In one aspect, the disclosure provides a method of treating a subject with a CAR-expressing cell therapy in combination with radiotherapy. In some embodiments, the CAR-expressing cell therapy is administered after the administration of radiotherapy. In some embodiments, the CAR-expressing cell therapy is administered less than 30 days, e.g., less than 29, 28, 27, 26, 25, 24, 23, 22, 21, 20, 19, 18, 17, 16, 15, 14, 13, 12, 11, 10, 9, 8, 7, 6, 5, 4, 3, 2, or 1 days, after administration of a lymphodepleting therapy comprising radiotherapy.

[0229] In another aspect, the disclosure provides a method of treating, e.g., preventing CRS in a subject with a CAR-expressing cell therapy, e.g., a CAR19 expressing cell therapy, comprising administering to the subject a lymphodepleting therapy comprising radiotherapy. In some embodiments, the radiotherapy is administered less than 30 days, e.g., less than 29, 28, 27, 26, 25, 24, 23, 22, 21, 20, 19, 18, 17, 16, 15, 14, 13, 12, 11, 10, 9, 8, 7, 6, 5, 4, 3, 2, or 1 days, prior to the administration of the CAR-expressing cell therapy. In some embodiments, the subject (i) is at risk of developing, has, or is diagnosed with CRS; (ii) is identified or has previously been identified as being at risk for CRS; and/or (iii) has been, is being, or will be administered a CAR therapy, e.g., a CD19 CAR-expressing cell. In some embodiments, the CRS is a severe CRS, e.g., grade 4 or 5 CRS, or less than severe CRS, e.g., grade 1, 2, or 3 CRS.

[0230] In some embodiments, the radiotherapy is administered at a dose of about 1-100 Gy, e.g., about 1-10, 10-20, 20-30, 30-40, 40-50, 50-60, 60-70, 80-90, or 90-100 Gy, or about 1-99, 5-90, 10-85, 15-80, 20-75, 25-70, 30-65, 35-60, 40-55 or 45-50 Gy. In some embodiments, the radiotherapy is administered at a dose of about 50 Gy, e.g., about 49, 48, 47, 46, 45, 44, 43, 42, 41, 40, 35, 30, 25, 24, 23, 22, 21, 20, 15, 10, 9, 8, 7, 6, 5, 4, 3, 2.9, 2.8, 2.7, 2.6, 2.5, 2.4, 2.3, 2.2, 2.1, 2 or 1 Gy. In some embodiments, the radiotherapy is administered at a dose of about 40 Gy, e.g., 40 Gy. In some embodiments, the radiotherapy is administered at a dose of about 22 Gy, e.g., 22 Gy. In some embodiments, the radiotherapy is administered at a dose of about 4 Gy, e.g., 4 Gy. In some embodiments, the radiotherapy is administered at a dose of about 2.2 Gy, e.g., 2.2 Gy.

[0231] In some embodiments of any of the methods disclosed herein, the radiotherapy is administered as a single dose, e.g., at a dose described herein.

[0232] In some embodiments of any of the methods disclosed herein, the radiotherapy is administered as a fractionated dose, e.g., one or more doses (e.g., two, three or four partial doses). In some embodiments, the radiotherapy consists of a total dose administered as a fractionated dose, e.g., one or more doses (e.g., two, three or four partial doses). In some embodiments, the radiotherapy is administered as two doses, e.g., two fractionated doses, e.g., a first dose and a second dose. In some embodiments, the first dose, e.g., first fractionated dose, is at least about 40 fold higher, e.g., about 39, 38, 37, 36, 35, 34, 33, 32, 31, 30, 29, 28, 27, 26, 25, 24, 23, 22, 21, 20, 19, 18, 17, 16, 15, 14, 13, 12, 11, 10, 9, 8, 7, 6, 5, 4, 3, 2, or 1.5 fold higher than the subsequent dose, e.g., second dose, e.g., second fractionated dose. In some embodiments, the first dose, e.g., first fractionated dose, is at least about 20 fold higher than the subsequent dose, e.g., second dose, e.g., second fractionated dose. In some embodiments, the first dose, e.g., first fractionated dose, is at least about 10 fold higher than the subsequent dose, e.g., second dose, e.g., second fractionated dose. In some embodiments, the first dose, e.g., first fractionated dose, is at least about 2 fold higher than the subsequent dose, e.g., second dose, e.g., second fractionated dose.

[0233] In some embodiments, the first dose, e.g., first fractionated dose is about 40 Gy, and the second dose, e.g., second fractionated dose, is about 2 Gy.

[0234] In some embodiments, the first dose, e.g., first fractionated dose is about 4 Gy, and the second dose, e.g., second fractionated dose, is about 2 Gy.

[0235] In some embodiments, the first dose, e.g., first fractionated dose is about 22 Gy, and the second dose, e.g., second fractionated dose, is about 2.2 Gy.

[0236] In some embodiments, the one or more fractionated doses of radiotherapy, e.g., first, second, third and/or fourth fractionated doses of radiotherapy, are administered 30 days prior to administration of a CAR-expressing cell therapy, e.g., CAR19-expressing cell therapy. In some embodiments, the one or more fractionated doses of radiotherapy, e.g., first, second, third and/or fourth fractionated doses of radiotherapy, are administered within 30 days prior to administration of a CAR-expressing cell therapy, e.g., CAR19-expressing cell therapy.

[0237] In some embodiments, the one or more fractionated doses of radiotherapy, e.g., first and second fractionated doses of radiotherapy, are administered within about 30 days of each other, e.g., the second dose is administered in less than 30 days from the administration of the first dose.

[0238] In some embodiments, the one or more fractionated doses of radiotherapy, e.g., first and second fractionated doses of radiotherapy, are administered more than about 30 days apart, e.g., the second dose is administered more than 30 days, e.g., from the administration of the first dose.

[0239] In some embodiments of any of the methods disclosed herien, the lymphodepleting therapy consists of, e.g., consists essentially of radiotherapy.

[0240] In some embodiments of any of the methods disclosed herein, the lymphodepleting therapy comprises radiotherapy. In some embodiments, the lymphodepleting therapy further comprises a chemotherapeutic agent described herein. In some embodiments, when the lymphodepleting therapy comprises radiotherapy and a chemotherapeutic agent, the chemotherapeutic agent is not cyclophosphamide.

[0241] In some embodiments of any of the methods disclosed herein, the lymphodepleting therapy comprises radiotherapy and a chemotherapeutic agent. In some embodiments, the chemotherapeutic agent is cyclophosphamide. In some embodiments, the cyclophosphamide is administered at a dose of more than 750 mg/m², e.g., about 800, 850, 900, 950, 1000, 1100, 1500 or 2000 mg/m². In some embodiments, the cyclophosphamide is administered at a dose of less than 750 mg/m², e.g., about 700, 650, 600, 550, 500, 400, 300, 200 or 100 mg/m². In some embodiments, the chemotherapeutic agent is cyclophosphamide and the cyclophosphamide is not administered at a does of 750 mg/m².

[0242] In some embodiments of a lymphodepleting therapy comprising radiotherapy and cyclophosphamide, the radiotherapy is not administered at a dose of 4 Gy or 2.2 Gy.

### CRS Grading

[0243] In some embodiments, CRS can be graded in severity from 1-5 as follows. Grades 1-3 are less than severe CRS. Grades 4-5 are severe CRS. For Grade 1 CRS, only symptomatic treatment is needed (e.g., nausea, fever, fatigue, myalgias, malaise, headache) and symptoms are not life threatening. For Grade 2 CRS, the symptoms require moderate intervention and generally respond to moderate intervention. Subjects having Grade 2 CRS develop hypotension that is responsive to either fluids or one low-dose vasopressor; or they develop grade 2 organ toxicity or mild respiratory symptoms that are responsive to low flow oxygen (<40% oxygen). In Grade 3 CRS subjects, hypotension generally cannot be reversed by fluid therapy or one low-dose vasopressor. These subjects generally require more than low flow oxygen and have grade 3 organ toxicity (e.g., renal or cardiac dysfunction or coagulopathy) and/or grade 4 transaminitis. Grade 3 CRS subjects require more aggressive intervention, e.g., oxygen of 40% or higher, high dose vasopressor(s), and/or multiple vasopressors. Grade 4 CRS subjects suffer from immediately life-threatening symptoms, including grade 4 organ toxicity or a need for mechanical ventilation. Grade 4 CRS subjects generally do not have transaminitis. In Grade 5 CRS subjects, the toxicity causes death. Sets of criteria for grading CRS are provided herein as Table 28B, Table 28C, and Table 28D. Unless otherwise specified, CRS as used herein refers to CRS according to the criteria of Table 28B.

[0244] In embodiments, CRS is graded according to Table 28B:

TABLE 28B
CRS grading

| | |
|---|---|
| Gr1 | Supportive care only |
| Gr2 | IV therapies +/− hospitalization. |
| Gr3 | Hypotension requiring IV fluids or low-dose vasoactives or |
| | hypoxemia requiring oxygen, CPAP, or BIPAP. |
| Gr4 | Hypotension requiring high-dose vasoactives or hypoxemia |
| | requiring mechanical ventilation. |
| Gr 5 | Death |

TABLE 28C
CTCAE v 4.0 CRS grading scale

| CRS | |
|---|---|
| grade | Characteristics |
| Grade 1 | Mild; No infusion interruption; No intervention |
| Grade 2 | Infusion interruption indicated but responds promptly to |
| | symptomatic treatment (e.g., antihistamines, NSAIDS, narcotics, |
| | IV fluids); prophylactic medications indicated for <=24 hrs |
| Grade 3 | Prolonged (e.g., not rapidly responsive to symptomatic |
| | medications and/or brief interruption of infusion); recurrence of |
| | symptoms following initial improvement; hospitalization |
| | indicated for clinical sequelae (e.g., renal impairment, |
| | pulmonary infiltrates) |
| Grade 4 | Life threatening consequences; pressor or ventilator support |

TABLE 28D
NCI CRS grading scale

| CRS grade | Characteristics |
|---|---|
| Grade 1 | Symptoms are not life threatening and require symptomatic |
| | treatment only; e.g., fever, nausea, fatigue, headache, |
| | myalgias, malaise |
| Grade 2 | Symptoms require and respond to moderate intervention; |
| | Oxygen requirement <40% or hypotension responsive to fluids |
| | or low dose pressors or Grade 2 organ toxicity |
| Grade 3 | Symptoms require and respond to aggressive intervention; |
| | Oxygen requirement >=40% or Hypotension requiring high |
| | dose or multiple pressors or grade 3 organ toxicity or |
| | grade 4 transaminitis |
| Grade 4 | Life threatening symptoms Requirement for ventilator support |
| | or Grade 4; organ toxicity (excluding transaminitis) |

### CRS Therapies

[0245] Therapies for CRS include IL-6 inhibitor or IL-6 receptor (IL-6R) inhibitors (e.g., tocilizumab or siltuximab), bazedoxifene, sgp130 blockers, vasoactive medications, corticosteroids, immunosuppressive agents, and mechanical ventilation. Exemplary therapies for CRS are described in International Application WO2014011984, which is hereby incorporated by reference.

[0246] Tocilizumab is a humanized, immunoglobulin Glkappa anti-human IL-6R monoclonal antibody. See, e.g., id. Tocilizumab blocks binding of IL-6 to soluble and membrane bound IL-6 receptors (IL-6Rs) and thus inhibits classical and trans-IL-6 signaling. In embodiments, tocilizumab is administered at a dose of about 4-12 mg/kg, e.g., about 4-8 mg/kg for adults and about 8-12 mg/kg for pediatric subjects, e.g., administered over the course of 1 hour.

[0247] In some embodiments, the CRS therapeutic is an inhibitor of IL-6 signalling, e.g., an inhibitor of IL-6 or IL-6 receptor. In one embodiment, the inhibitor is an anti-IL-6 antibody, e.g., an anti-IL-6 chimeric monoclonal antibody such as siltuximab. In other embodiments, the inhibitor comprises a soluble gp130 (sgp130) or a fragment thereof that is capable of blocking IL-6 signalling. In some embodiments, the sgp130 or fragment thereof is fused to a heterologous domain, e.g., an Fc domain, e.g., is a gp130-Fc fusion protein such as FE301. In embodiments, the inhibitor of IL-6 signalling comprises an antibody, e.g., an antibody to the IL-6 receptor, such as sarilumab, olokizumab (CDP6038), elsilimomab, sirukumab (CNTO 136), ALD518/BMS-945429, ARGX-109, or FM101. In some embodiments, the inhibitor of IL-6 signalling comprises a small molecule such as CPSI-2364.

[0248] In embodiments, the CAR-expressing cell is administered prior to, concurrently with, or subsequent to administration of one or more therapies for CRS described herein, e.g., one or more of IL-6 inhibitor or IL-6 receptor (IL-6R) inhibitors (e.g., tocilizumab), vasoactive medications, corticosteroids, immunosuppressive agents, or mechanical ventilation. In embodiments, the CAR-expressing cell is administered within 2 weeks (e.g., within 2 or 1 week, or within 14 days, e.g., within 14, 13, 12, 11, 10, 9, 8, 7, 6, 5, 4, 3, 2, 1 day or less) of administration of one or more therapies for CRS described herein, e.g., one or more of IL-6 inhibitors or IL-6 receptor (IL-6R) inhibitors (e.g., tocilizumab), vasoactive medications, corticosteroids, immunosuppressive agents, or mechanical ventilation. In embodiments, the CAR-expressing cell is administered at least 1 day (e.g., at least 1, 2, 3, 4, 5, 6, 7, 8, 9, 10, 11, 12, 13, 14, 15, 16, 17, 18, 19, 20, 1, week, 2 weeks, 3 weeks, 4 weeks, 1 month, 2 months, 3 months, 3 months, or more) before or after administration of one or more therapies for CRS described herein, e.g., one or more of IL-6 inhibitors or IL-6 receptor (IL-6R) inhibitors (e.g., tocilizumab), vasoactive medications, corticosteroids, immunosuppressive agents, or mechanical ventilation.

[0249] In embodiments, a subject herein is administered a single dose of an IL-6 inhibitor or IL-6 receptor (IL-6R) inhibitor (e.g., tocilizumab). In embodiments, the subject is administered a plurality of doses (e.g., 2, 3, 4, 5, 6, or more doses) of an IL-6 inhibitor or IL-6 receptor (IL-6R) inhibitor (e.g., tocilizumab).

[0250] In some embodiments, the subject at risk of developing severe CRS is administered an anti-IFN-gamma or anti-sIL2Ra therapy, e.g., an antibody molecule directed against IFN-gamma or sIL2Ra.

[0251] In embodiments, for a subject who has received a therapeutic antibody molecule such as blinatumomab and who has CRS or is at risk of developing CRS, the therapeutic antibody molecule is administered at a lower dose and/or a lower frequency, or administration of the therapeutic antibody molecule is halted.

[0252] In embodiments, a subject who has CRS or is at risk of developing CRS is treated with a fever reducing medication such as acetaminophen.

[0253] In embodiments, a subject herein is administered or provided one or more therapies for CRS described herein, e.g., one or more of IL-6 inhibitors or IL-6 receptor (IL-6R) inhibitors (e.g., tocilizumab), vasoactive medications, corticosteroids, immunosuppressive agents, or mechanical ventilation, in any combination, e.g., in combination with a CAR-expressing cell described herein.

[0254] In embodiments, a subject at risk of developing CRS (e.g., severe CRS) (e.g., identified as having a high risk status for developing severe CRS) is administered one or more therapies for CRS described herein, e.g., one or more of IL-6 inhibitor or IL-6 receptor (IL-6R) inhibitors (e.g., tocilizumab), vasoactive medications, corticosteroids, immunosuppressive agents, or mechanical ventilation, in any combination, e.g., in combination with a CAR-expressing cell described herein.

[0255] In embodiments, a subject herein (e.g., a subject at risk of developing severe CRS or a subject identified as at risk of developing severe CRS) is transferred to an intensive care unit. In some embodiments, a subject herein (e.g., a subject at risk of developing severe CRS or a subject identified as at risk of developing severe CRS) is monitored for one ore more symptoms or conditions associated with CRS, such as fever, elevated heart rate, coagulopathy, MODS (multiple organ dysfunction syndrome), cardiovascular dysfunction, distributive shock, cardiomyopathy, hepatic dysfunction, renal dysfunction, encephalopathy, clinical seizures, respiratory failure, or tachycardia. In some embodiments, the methods herein comprise administering a therapy for one of the symptoms or conditions associated with CRS. For instance, in embodiments, e.g., if the subject develops coagulopathy, the method comprises administering cryoprecipitate. In some embodiments, e.g., if the subject develops cardiovascular dysfunction, the method comprises administering vasoactive infusion support. In some embodiments, e.g., if the subject develops distributive shock, the method comprises administering alpha-agonist therapy. In some embodiments, e.g., if the subject develops cardiomyopathy, the method comprises administering milrinone therapy. In some embodiments, e.g., if the subject develops respiratory failure, the method comprises performing mechanical ventilation (e.g., invasive mechanical ventilation or noninvasive mechanical ventilation). In some embodiments, e.g., if the subject develops shock, the method comprises administering crystalloid and/or colloid fluids.

[0256] In embodiments, the CAR-expressing cell is administered prior to, concurrently with, or subsequent to administration of one or more therapies for CRS described herein, e.g., one or more of IL-6 inhibitor or IL-6 receptor (IL-6R) inhibitors (e.g., tocilizumab), vasoactive medications, corticosteroids, immunosuppressive agents, or mechanical ventilation. In embodiments, the CAR-expressing cell is administered within 2 weeks (e.g., within 2 or 1 week, or within 14 days, e.g., within 14, 13, 12, 11, 10, 9, 8, 7, 6, 5, 4, 3, 2, 1 day or less) of administration of one or more therapies for CRS described herein, e.g., one or more of IL-6 inhibitors or IL-6 receptor (IL-6R) inhibitors (e.g., tocilizumab), vasoactive medications, corticosteroids, immunosuppressive agents, or mechanical ventilation. In embodiments, the CAR-expressing cell is administered at least 1 day (e.g., at least 1, 2, 3, 4, 5, 6, 7, 8, 9, 10, 11, 12, 13, 14, 15, 16, 17, 18, 19, 20, 1, week, 2 weeks, 3 weeks, 4 weeks, 1 month, 2 months, 3 months, 3 months, or more) before or after administration of one or more therapies for CRS described herein, e.g., one or more of IL-6 inhibitors or IL-6 receptor (IL-6R) inhibitors (e.g., tocilizumab), vasoactive medications, corticosteroids, immunosuppressive agents, or mechanical ventilation.

[0257] In embodiments, a subject herein (e.g., a subject at risk of developing severe CRS or a subject identified as at risk of developing severe CRS) is administered a single dose of an IL-6 inhibitor or IL-6 receptor (IL-6R) inhibitor (e.g., tocilizumab). In embodiments, the subject is administered a plurality of doses (e.g., 2, 3, 4, 5, 6, or more doses) of an IL-6 inhibitor or IL-6 receptor (IL-6R) inhibitor (e.g., tocilizumab).

[0258] In embodiments, a subject at low or no risk of developing CRS (e.g., severe CRS) (e.g., identified as having a low risk status for developing severe CRS) is not administered a therapy for CRS described herein, e.g., one or more of IL-6 inhibitor or IL-6 receptor (IL-6R) inhibitors (e.g., tocilizumab), vasoactive medications, corticosteroids, immunosuppressive agents, or mechanical ventilation.

[0259] In embodiments, a subject is determined to be at high risk of developing severe CRS by using an evaluation or prediction method described herein. In embodiments, a subject is determined to be at low risk of developing severe CRS by using an evaluation or prediction method described herein.

### CD19 Binding Domains and CARs

[0260] Provided herein are compositions of matter and methods of use for the treatment of a disease such as cancer using CD19 chimeric antigen receptors (CAR). The methods also include, e.g., administering a CD19 CAR described herein to treat a lymphoma, e.g., Hodgkin lymphoma or NHL (e.g., relapsed/refractory NHL), or a leukemia, e.g., ALL, e.g., B-ALL.

[0261] In one aspect, the invention provides a number of chimeric antigen receptors (CAR) comprising an antibody or antibody fragment engineered for specific binding to a CD19 protein. In one aspect, the invention provides a cell (e.g., T cell) engineered to express a CAR, wherein the CAR T cell (“CART”) exhibits an anticancer property. In one aspect a cell is transformed with the CAR and the CAR is expressed on the cell surface. In some embodiments, the cell (e.g., T cell) is transduced with a viral vector encoding a CAR. In some embodiments, the viral vector is a retroviral vector. In some embodiments, the viral vector is a lentiviral vector. In some such embodiments, the cell may stably express the CAR. In another embodiment, the cell (e.g., T cell) is transfected with a nucleic acid, e.g., mRNA, cDNA, DNA, encoding a CAR. In some such embodiments, the cell may transiently express the CAR.

[0262] In one aspect, the anti-CD19 protein binding portion of the CAR is a scFv antibody fragment. In one aspect such antibody fragments are functional in that they retain the equivalent binding affinity, e.g., they bind the same antigen with comparable affinity, as the IgG antibody from which it is derived. In one aspect such antibody fragments are functional in that they provide a biological response that can include, but is not limited to, activation of an immune response, inhibition of signal-transduction origination from its target antigen, inhibition of kinase activity, and the like, as will be understood by a skilled artisan. In one aspect, the anti-CD19 antigen binding domain of the CAR is a scFv antibody fragment that is humanized compared to the murine sequence of the scFv from which it is derived. In one aspect, the parental murine scFv sequence is the CAR19 construct provided in PCT publication WO2012/079000 and provided herein as SEQ ID NO:59. In one embodiment, the anti-CD19 binding domain is a scFv described in WO2012/079000 and provided in SEQ ID NO:59, or a sequence at least 95%, e.g., 95-99%, identical thereto. In an embodiment, the anti-CD19 binding domain is part of a CAR construct provided in PCT publication WO2012/079000 and provided herein as SEQ ID NO:58, or a sequence at least 95%, e.g., 95%-99%, identical thereto. In an embodiment, the anti-CD19 binding domain comprises at least one (e.g., 2, 3, 4, 5, or 6) CDRs selected from Table 4 and/or Table 5.

[0263] In some aspects, the antibodies of the invention are incorporated into a chimeric antigen receptor (CAR). In one aspect, the CAR comprises the polypeptide sequence provided as SEQ ID NO: 12 in PCT publication WO2012/079000, and provided herein as SEQ ID NO: 58, wherein the scFv domain is substituted by one or more sequences selected from SEQ ID NOS: 1-12. In one aspect, the scFv domains of SEQ ID NOS:1-12 are humanized variants of the scFv domain of SEQ ID NO:59, which is an scFv fragment of murine origin that specifically binds to human CD19. Humanization of this mouse scFv may be desired for the clinical setting, where the mouse-specific residues may induce a human-anti-mouse antigen (HAMA) response in patients who receive CART19 treatment, e.g., treatment with T cells transduced with the CAR19 construct.

[0264] In one embodiment, the CD19 CAR comprises an amino acid sequence provided as SEQ ID NO: 12 in PCT publication WO2012/079000. In embodiment, the amino acid sequence is:

[0265] MALPVTALLLPLALLLHAARPdiqmtqttsslsaslgdrvtiscrasqdiskylnwyqqkpdgtvklliyhts rlhsgvpsrfsgsgsgtdysltisnleqediatyfcqqgntlpytfgggtkleitggggsggggsggggsevklqesgpglvapsqslsvt ctvsgvslpdygvswirqpprkglewlgviwgsettyynsalksrltiikdnsksqvflkmnslqtddtaiyycakhyyyggsyamd ywgqgtsvtvsstttpaprpptpaptiasqplslrpeacrpaaggavhtrgldfacdiyiwaplagtcgvlllslvitlyckrgrkkllyifk qpfmrpvqttqeedgcscrfpeeeeggcelrvkfsrsadapaykqgqnqlynelnlgrreeydvldkrrgrdpemggkprrknpqeg lynelqkdkmaeayseigmkgerrrgkghdglyqglstatkdtydalhmqalppr (SEQ ID NO: 58), or a sequence substantially homologous thereto.

[0266] In embodiment, the amino acid sequence is diqmtqttsslsaslgdrvtiscrasqdiskylnwyqqkpdgtvklliyhtsrlhsgvpsrfsgsgsgtdysltisnleqediaty fcqqgntlpytfgggtkleitggggsggggsggggsevklqesgpglvapsqslsvtctvsgvslpdygvswirqpprkglewlgviw gsettyynsalksrltiikdnsksqvflkmnslqtddtaiyycakhyyyggsyamdywgqgtsvtvsstttpaprpptpaptiasqplsl rpeacrpaaggavhtrgldfacdiyiwaplagtcgvlllslvitlyckrgrkkllyifkqpfmrpvqttqeedgcscrfpeeeeggcelrvk fsrsadapaykqgqnqlynelnlgrreeydvldkrrgrdpemggkprrknpqeglynelqkdkmaeayseigmkgerrrgkghdg lyqglstatkdtydalhmqalppr (SEQ ID NO: 1633), or a sequence substantially homologous thereto.

[0267] In one embodiment, the CD19 CAR has the USAN designation TISAGENLECLEUCEL-T. In embodiments, CTL019 is made by a gene modification of T cells is mediated by stable insertion via transduction with a self-inactivating, replication deficient Lentiviral (LV) vector containing the CTL019 transgene under the control of the EF-1 alpha promoter. CTL019 can be a mixture of transgene positive and negative T cells that are delivered to the subject on the basis of percent transgene positive T cells.

[0268] In one aspect, the humanized CAR19 comprises the scFv portion provided in SEQ ID NO:1. In one aspect, the humanized CAR19 comprises the scFv portion provided in SEQ ID NO:2. In one aspect, the humanized CAR19 comprises the scFv portion provided in SEQ ID NO:3. In one aspect, the humanized CAR19 comprises the scFv portion provided in SEQ ID NO:4. In one aspect, the humanized CAR19 comprises the scFv portion provided in SEQ ID NO:5. In one aspect, the humanized CAR19 comprises the scFv portion provided in SEQ ID NO:6. In one aspect, the humanized CAR19 comprises the scFv portion provided in SEQ ID NO:7. In one aspect, the humanized CAR19 comprises the scFv portion provided in SEQ ID NO:8. In one aspect, the humanized CAR19 comprises the scFv portion provided in SEQ ID NO:9. In one aspect, the humanized CAR19 comprises the scFv portion provided in SEQ ID NO:10. In one aspect, the humanized CAR19 comprises the scFv portion provided in SEQ ID NO:11. In one aspect, the humanized CAR19 comprises the scFv portion provided in SEQ ID NO:12.

[0269] In one aspect, the CARs of the invention combine an antigen binding domain of a specific antibody with an intracellular signaling molecule. For example, in some aspects, the intracellular signaling molecule includes, but is not limited to, CD3-zeta chain, 4-1BB and CD28 signaling modules and combinations thereof. In one aspect, the CD19 CAR comprises a CAR selected from the sequence provided in one or more of SEQ ID NOS: 31-42. In one aspect, the CD19 CAR comprises the sequence provided in SEQ ID NO:31. In one aspect, the CD19 CAR comprises the sequence provided in SEQ ID NO:32. In one aspect, the CD19 CAR comprises the sequence provided in SEQ ID NO:33. In one aspect, the CD19 CAR comprises the sequence provided in SEQ ID NO:34. In one aspect, the CD19 CAR comprises the sequence provided in SEQ ID NO:35. In one aspect, the CD19 CAR comprises the sequence provided in SEQ ID NO:36. In one aspect, the CD19 CAR comprises the sequence provided in SEQ ID NO:37. In one aspect, the CD19 CAR comprises the sequence provided in SEQ ID NO:38. In one aspect, the CD19 CAR comprises the sequence provided in SEQ ID NO:39. In one aspect, the CD19 CAR comprises the sequence provided in SEQ ID NO:40. In one aspect, the CD19 CAR comprises the sequence provided in SEQ ID NO:41. In one aspect, the CD19 CAR comprises the sequence provided in SEQ ID NO:42.

[0270] In embodiments, the CAR molecule is a CD19 CAR molecule described herein, e.g., a humanized CAR molecule described herein, e.g., a humanized CD19 CAR molecule of Table 2 or having CDRs as set out in Tables 4 and 5.

[0271] In embodiments, the CAR molecule is a CD19 CAR molecule described herein, e.g., a murine CAR molecule described herein, e.g., a murine CD19 CAR molecule of Table 3 or having CDRs as set out in Tables 4 and 5.

[0272] In some embodiments, the CAR molecule comprises one, two, and/or three CDRs from the heavy chain variable region and/or one, two, and/or three CDRs from the light chain variable region of the murine or humanized CD19 CAR of Table 4 and 5.

[0273] In one embodiment, the antigen binding domain comprises one, two three (e.g., all three) heavy chain CDRs, HC CDR1, HC CDR2 and HC CDR3, from an antibody listed above, and/or one, two, three (e.g., all three) light chain CDRs, LC CDR1, LC CDR2 and LC CDR3, from an antibody listed above. In one embodiment, the antigen binding domain comprises a heavy chain variable region and/or a variable light chain region of an antibody listed or described above.

[0274] In an embodiment, the antigen binding domain comprises a humanized antibody or an antibody fragment. In one embodiment, the humanized anti-CD19 binding domain comprises one or more (e.g., all three) light chain complementary determining region 1 (LC CDR1), light chain complementary determining region 2 (LC CDR2), and light chain complementary determining region 3 (LC CDR3) of a murine or humanized anti-CD19 binding domain described herein, and/or one or more (e.g., all three) heavy chain complementary determining region 1 (HC CDR1), heavy chain complementary determining region 2 (HC CDR2), and heavy chain complementary determining region 3 (HC CDR3) of a murine or humanized anti-CD19 binding domain described herein, e.g., a humanized anti-CD19 binding domain comprising one or more, e.g., all three, LC CDRs and one or more, e.g., all three, HC CDRs.

[0275] In one embodiment, an antigen binding domain comprises one, two three (e.g., all three) heavy chain CDRs, HC CDR1, HC CDR2 and HC CDR3, from an antibody listed herein, e.g., in Table 2, 4, or 5 and/or one, two, three (e.g., all three) light chain CDRs, LC CDR1, LC CDR2 and LC CDR3, from an antibody listed herein, e.g., in Table 2, 4, or 5. In one embodiment, the antigen binding domain comprises a heavy chain variable region and/or a variable light chain region of an antibody listed or described above.

[0276] In an embodiment, the CD19 binding domain (e.g., an scFv) comprises: a light chain variable region comprising an amino acid sequence having at least one, two or three modifications (e.g., substitutions) but not more than 30, 20 or 10 modifications (e.g., substitutions) of an amino acid sequence of a light chain variable region provided in Table 2, or a sequence with 95-99% identity with an amino acid sequence of Table 2; and/or a heavy chain variable region comprising an amino acid sequence having at least one, two or three modifications (e.g., substitutions) but not more than 30, 20 or 10 modifications (e.g., substitutions) of an amino acid sequence of a heavy chain variable region provided in Table 2, or a sequence with 95-99% identity to an amino acid sequence of Table 2. In embodiments, the CD19 binding domain comprises one or more CDRs (e.g., one each of a HC CDR1, HC CDR2, HC CDR3, LC CDR1, LC CDR2, and LC CDR3) of Table 4 or Table 5, or CDRs having one, two, three, four, five, or six modifications (e.g., substitutions) of one or more of the CDRs.

[0277] Exemplary anti-CD19 antibody molecules (including antibodies or fragments or conjugates thereof) can include a scFv, CDRs, or VH and VL chains described in Tables 2, 4, or 5. In an embodiment, the CD19-binding antibody molecule comprises: a light chain variable region comprising an amino acid sequence having at least one, two or three modifications (e.g., substitutions) but not more than 30, 20 or 10 modifications (e.g., substitutions) of an amino acid sequence of a light chain variable region provided in Table 2, or a sequence with 95-99% identity with an amino acid sequence of Table 2; and/or a heavy chain variable region comprising an amino acid sequence having at least one, two or three modifications (e.g., substitutions) but not more than 30, 20 or 10 modifications (e.g., substitutions) of an amino acid sequence of a heavy chain variable region provided in Table 2, or a sequence with 95-99% identity to an amino acid sequence of Table 2. In embodiments, the CD19-binding antibody molecule comprises one or more CDRs (e.g., one each of a HC CDR1, HC CDR2, HC CDR3, LC CDR1, LC CDR2, and LC CDR3) of Table 4 or Table 5, or CDRs having one, two, three, four, five, or six modifications (e.g., substitutions) of one or more of the CDRs. The antibody molecule may be, e.g., an isolated antibody molecule.

[0278] In some embodiments, the humanized anti-CD19 binding domain comprises a HC CDR1, a HC CDR2, and a HC CDR3 of any heavy chain binding domain amino acid sequences listed in Table 2. In embodiments, the antigen binding domain further comprises a LC CDR1, a LC CDR2, and a LC CDR3. In embodiments, the antigen binding domain comprises a LC CDR1, a LC CDR2, and a LC CDR3 of any light chain binding domain amino acid sequences listed in Table 2.

[0279] In some embodiments, the antigen binding domain comprises one, two or all of LC CDR1, LC CDR2, and LC CDR3 of any light chain binding domain amino acid sequences listed in Table 2, and one, two or all of HC CDR1, HC CDR2, and HC CDR3 of any heavy chain binding domain amino acid sequences listed in Table 2.

[0280] In some embodiments, the CDRs are defined according to the Kabat numbering scheme, the Chothia numbering scheme, or a combination thereof.

[0281] The sequences of humanized CDR sequences of the scFv domains are shown in Table 4 for the heavy chain variable domains and in Table 5 for the light chain variable domains. “ID” stands for the respective SEQ ID NO for each CDR.

[0282] In some embodiments, the CD19 binding domain comprises a Kabat HCDR1 having a sequence of DYGVS (SEQ ID NO: 1634), an HCDR2 of Table 4, an HCDR3 of Table 4, an LCDR1 of Table 5, an LCDR2 of Table 5, and an LCDR3 of Table 5.

[0283] In one embodiment, the humanized anti-CD19 binding domain comprises a sequence selected from a group consisting of SEQ ID NO:1, SEQ ID NO:2, SEQ ID NO:3, SEQ ID NO:4, SEQ ID NO:5, SEQ ID NO:6, SEQ ID NO:7, SEQ ID NO:8, SEQ ID NO:9, SEQ ID NO:10, SEQ ID NO:11, and SEQ ID NO:12, or a sequence with 95-99% identity thereof. In one embodiment, the nucleic acid sequence encoding the humanized anti-CD19 binding domain comprises a sequence selected from a group consisting of SEQ ID NO:61, SEQ ID NO:62, SEQ ID NO:63, SEQ ID NO:64, SEQ ID NO:65, SEQ ID NO:66, SEQ ID NO:67, SEQ ID NO:68, SEQ ID NO:70, SEQ ID NO:71 and SEQ ID NO:72, or a sequence with 95-99% identity thereof.

[0284] In one embodiment, the humanized anti-CD19 binding domain is a scFv, and a light chain variable region comprising an amino acid sequence described herein, e.g., in Table 2, is attached to a heavy chain variable region comprising an amino acid sequence described herein, e.g., in Table 2, via a linker, e.g., a linker described herein. In one embodiment, the humanized anti-CD19 binding domain includes a (Gly4-Ser)n linker, wherein n is 1, 2, 3, 4, 5, or 6, e.g., 3 or 4 (SEQ ID NO:53). The light chain variable region and heavy chain variable region of a scFv can be, e.g., in any of the following orientations: light chain variable region-linker-heavy chain variable region or heavy chain variable region-linker-light chain variable region.

[0285] In one aspect, the antigen binding domain portion comprises one or more sequence selected from SEQ ID NOS:1-12. In one aspect the humanized CAR is selected from one or more sequence selected from SEQ ID NOS: 31-42. In some aspects, a non-human antibody is humanized, where specific sequences or regions of the antibody are modified to increase similarity to an antibody naturally produced in a human or fragment thereof.

[0286] In one embodiment, the anti-CD19 binding domain comprises a murine light chain variable region described herein (e.g., in Table 3) and/or a murine heavy chain variable region described herein (e.g., in Table 3). In one embodiment, the anti-CD19 binding domain is a scFv comprising a murine light chain and a murine heavy chain of an amino acid sequence of Table 3. In an embodiment, the anti-CD19 binding domain (e.g., an scFv) comprises: a light chain variable region comprising an amino acid sequence having at least one, two or three modifications (e.g., substitutions) but not more than 30, 20 or 10 modifications (e.g., substitutions) of an amino acid sequence of a light chain variable region provided in Table 3, or a sequence with 95-99% identity with an amino acid sequence of Table 3; and/or a heavy chain variable region comprising an amino acid sequence having at least one, two or three modifications (e.g., substitutions) but not more than 30, 20 or 10 modifications (e.g., substitutions) of an amino acid sequence of a heavy chain variable region provided in Table 3, or a sequence with 95-99% identity to an amino acid sequence of Table 3. In one embodiment, the anti-CD19 binding domain comprises a sequence of SEQ ID NO:59, or a sequence with 95-99% identity thereof. In one embodiment, the anti-CD19 binding domain is a scFv, and a light chain variable region comprising an amino acid sequence described herein, e.g., in Table 3, is attached to a heavy chain variable region comprising an amino acid sequence described herein, e.g., in Table 3, via a linker, e.g., a linker described herein. In one embodiment, the antigen binding domain includes a (Gly4-Ser)n linker, wherein n is 1, 2, 3, 4, 5, or 6, e.g., 3 or 4 (SEQ ID NO: 53). The light chain variable region and heavy chain variable region of a scFv can be, e.g., in any of the following orientations: light chain variable region-linker-heavy chain variable region or heavy chain variable region-linker-light chain variable region.

[0287] In embodiments, the CAR molecule comprises a CD19 inhibitor comprising an antibody or antibody fragment which includes a CD19 binding domain, a transmembrane domain, and an intracellular signaling domain comprising a stimulatory domain, and wherein said CD19 binding domain comprises one or more of (e.g., all three of) light chain complementary determining region 1 (LC CDR1), light chain complementary determining region 2 (LC CDR2), and light chain complementary determining region 3 (LC CDR3) of any CD19 light chain binding domain amino acid sequence listed in Tables 2 or 3, and one or more of (e.g., all three of) heavy chain complementary determining region 1 (HC CDR1), heavy chain complementary determining region 2 (HC CDR2), and heavy chain complementary determining region 3 (HC CDR3) of any CD19 heavy chain binding domain amino acid sequence listed in Tables 2 or 3.

[0288] In embodiments, a CD19 CAR comprises light chain variable region listed in Tables 2 or 3 and any heavy chain variable region listed Tables 2 or 3.

[0289] In embodiments, the CD19 inhibitor comprises a CD19 binding domain which comprises a sequence selected from a group consisting of SEQ ID NO:1, SEQ ID NO:2, SEQ ID NO:3, SEQ ID NO: 4, SEQ ID NO:5, SEQ ID NO:6, SEQ ID NO:7, SEQ ID NO:8, SEQ ID NO:9, SEQ ID NO:10, SEQ ID NO:11 and SEQ ID NO:12, or a sequence with 95-99% identity thereof. In embodiments, the CD19 CAR comprises a polypeptide of SEQ ID NO:58.

[0290] In one embodiment, the CAR molecule comprises an anti-CD19 binding domain comprising one or more (e.g., all three) light chain complementary determining region 1 (LC CDR1), light chain complementary determining region 2 (LC CDR2), and light chain complementary determining region 3 (LC CDR3) of an anti-CD19 binding domain described herein, and one or more (e.g., all three) heavy chain complementary determining region 1 (HC CDR1), heavy chain complementary determining region 2 (HC CDR2), and heavy chain complementary determining region 3 (HC CDR3) of an anti-CD19 binding domain described herein, e.g., an anti-CD19 binding domain comprising one or more, e.g., all three, LC CDRs and one or more, e.g., all three, HC CDRs. In one embodiment, the anti-CD19 binding domain comprises one or more (e.g., all three) heavy chain complementary determining region 1 (HC CDR1), heavy chain complementary determining region 2 (HC CDR2), and heavy chain complementary determining region 3 (HC CDR3) of an anti-CD19 binding domain described herein, e.g., the anti-CD19 binding domain has two variable heavy chain regions, each comprising a HC CDR1, a HC CDR2 and a HC CDR3 described herein.

[0291] In one aspect, the anti-CD19 binding domain is characterized by particular functional features or properties of an antibody or antibody fragment. For example, in one aspect, the portion of a CAR composition of the invention that comprises an antigen binding domain specifically binds human CD19. In one aspect, the invention relates to an antigen binding domain comprising an antibody or antibody fragment, wherein the antibody binding domain specifically binds to a CD19 protein or fragment thereof, wherein the antibody or antibody fragment comprises a variable light chain and/or a variable heavy chain that includes an amino acid sequence of SEQ ID NO: 1-12 or SEQ ID NO:59. In one aspect, the antigen binding domain comprises an amino acid sequence of an scFv selected from SEQ ID NOs: 1-12 or SEQ ID NO:59. In certain aspects, the scFv is contiguous with and in the same reading frame as a leader sequence. In one aspect the leader sequence is the polypeptide sequence provided as SEQ ID NO:13.

[0292] In one aspect, the portion of the CAR comprising the antigen binding domain comprises an antigen binding domain that targets CD19. In one aspect, the antigen binding domain targets human CD19. In one aspect, the antigen binding domain of the CAR has the same or a similar binding specificity as, or includes, the FMC63 scFv fragment described in Nicholson et al. Mol. Immun. 34 (16-17): 1157-1165 (1997). In one aspect, the portion of the CAR comprising the antigen binding domain comprises an antigen binding domain that targets a B-cell antigen, e.g., a human B-cell antigen. A CD19 antibody molecule can be, e.g., an antibody molecule (e.g., a humanized anti-CD19 antibody molecule) described in WO2014/153270, which is incorporated herein by reference in its entirety. WO2014/153270 also describes methods of assaying the binding and efficacy of various CART constructs.

[0293] In some embodiments, the CD19 CAR comprises an antigen binding domain derived from (e.g., comprises an amino acid sequence of) an anti-CD19 antibody (e.g., an anti-CD19 mono- or bispecific antibody) or a fragment or conjugate thereof. In one embodiment, the anti-CD19 antibody is a humanized antigen binding domain as described in WO2014/153270 (e.g., Table 3 of WO2014/153270) incorporated herein by reference, or a conjugate thereof. Other exemplary anti-CD19 antibodies or fragments or conjugates thereof, include but are not limited to, a bispecific T cell engager that targets CD19 (e.g., blinatumomab), SAR3419 (Sanofi), MEDI-551 (Medlmmune LLC), Combotox, DT2219ARL (Masonic Cancer Center), MOR-208 (also called XmAb-5574; MorphoSys), XmAb-5871 (Xencor), MDX-1342 (Bristol-Myers Squibb), SGN-CD19A (Seattle Genetics), and AFM11 (Affimed Therapeutics). See, e.g., Hammer. MAbs. 4.5(2012): 571-77. Blinatomomab is a bispecific antibody comprised of two scFvs—one that binds to CD19 and one that binds to CD3. Blinatomomab directs T cells to attack cancer cells. See, e.g., Hammer et al.; Clinical Trial Identifier No. NCT00274742 and NCT01209286. MEDI-551 is a humanized anti-CD19 antibody with a Fc engineered to have enhanced antibody-dependent cell-mediated cytotoxicity (ADCC). See, e.g., Hammer et al.; and Clinical Trial Identifier No. NCT01957579. Combotox is a mixture of immunotoxins that bind to CD19 and CD22. The immunotoxins are made up of scFv antibody fragments fused to a deglycosylated ricin A chain. See, e.g., Hammer et al.; and Herrera et al. J. Pediatr. Hematol. Oncol. 31.12(2009):936-41; Schindler et al. Br. J. Haematol. 154.4(2011):471-6. DT2219ARL is a bispecific immunotoxin targeting CD19 and CD22, comprising two scFvs and a truncated diphtheria toxin. See, e.g., Hammer et al.; and Clinical Trial Identifier No. NCT00889408. SGN-CD19A is an antibody-drug conjugate (ADC) comprised of an anti-CD19 humanized monoclonal antibody linked to a synthetic cytotoxic cell-killing agent, monomethyl auristatin F (MMAF). See, e.g., Hammer et al.; and Clinical Trial Identifier Nos. NCT01786096 and NCT01786135. SAR3419 is an anti-CD19 antibody-drug conjugate (ADC) comprising an anti-CD19 humanized monoclonal antibody conjugated to a maytansine derivative via a cleavable linker. See. e.g., Younes et al. J. Clin. Oncol. 30.2(2012): 2776-82; Hammer et al.; Clinical Trial Identifier No. NCT00549185; and Blanc et al. Clin Cancer Res. 2011; 17:6448-58. XmAb-5871 is an Fc-engineered, humanized anti-CD19 antibody. See, e.g., Hammer et al. MDX-1342 is a human Fc-engineered anti-CD19 antibody with enhanced ADCC. See, e.g., Hammer et al. In embodiments, the antibody molecule is a bispecific anti-CD19 and anti-CD3 molecule. For instance, AFM11 is a bispecific antibody that targets CD19 and CD3. See, e.g., Hammer et al.; and Clinical Trial Identifier No. NCT02106091. In some embodiments, an anti-CD19 antibody described herein is conjugated or otherwise bound to a therapeutic agent, e.g., a chemotherapeutic agent, peptide vaccine (such as that described in Izumoto et al. 2008 J Neurosurg 108:963-971), immunosuppressive agent, or immunoablative agent, e.g., cyclosporin, azathioprine, methotrexate, mycophenolate, FK506, CAMPATH, anti-CD3 antibody, cytoxin, fludarabine, rapamycin, mycophenolic acid, steroid, FR901228, or cytokine.

[0294] In one embodiment, an antigen binding domain against CD19 is an antigen binding portion, e.g., CDRs, of an antigen binding domain described in a Table herein. In one embodiment, a CD19 antigen binding domain can be from any CD19 CAR, e.g., LG-740; U.S. Pat. Nos. 8,399,645; 7,446,190; Xu et al., Leuk Lymphoma. 2013 54(2):255-260(2012); Cruz et al., Blood 122(17):2965-2973 (2013); Brentjens et al., Blood, 118(18):4817-4828 (2011); Kochenderfer et al., Blood 116(20):4099-102 (2010); Kochenderfer et al., Blood 122 (25):4129-39(2013); and 16th Annu Meet Am Soc Gen Cell Ther (ASGCT) (May 15-18, Salt Lake City) 2013, Abst 10, each of which is herein incorporated by reference in its entirety.

[0295] In embodiments, the CAR molecule comprises a CD19 CAR molecule described herein, e.g., a CD19 CAR molecule described in US-2015-0283178-A1, e.g., CTL019. In embodiments, the CD19 CAR comprises an amino acid, or has a nucleotide sequence shown in US-2015-0283178-A1, incorporated herein by reference.

[0296] In one aspect, the invention provides a cell (e.g., T cell) engineered to express a chimeric antigen receptor (CAR), wherein the CAR-expressing cell, e.g., CAR T cell (“CART”) exhibits an anticancer property. A suitable antigen is CD19. In one aspect, the antigen binding domain of the CAR comprises a partially humanized anti-CD19 antibody fragment. In one aspect, the antigen binding domain of the CAR comprises a partially humanized anti-CD19 antibody fragment comprising an scFv. Accordingly, the invention provides (among other things) a CD19-CAR that comprises a humanized anti-CD19 binding domain and is engineered into an immune effector cell, e.g., a T cell or an NK cell, and methods of their use for adoptive therapy.

[0297] In one aspect, the CAR, e.g., CD19-CAR comprises at least one intracellular domain selected from the group of a CD137 (4-1BB) signaling domain, a CD28 signaling domain, a CD3zeta signal domain, and any combination thereof. In one aspect, the CAR, e.g., CD19-CAR comprises at least one intracellular signaling domain is from one or more co-stimulatory molecule(s) other than a CD137 (4-1BB) or CD28.

### Exemplary CD19 CAR Constructs

[0298] Of the CD19 CAR constructs described in International Application WO2014/153270, certain sequences are reproduced herein. It is understood that the sequences in this section can also be used in the context of other CARs, e.g., as described herein, e.g., BCMA CARs.

[0299] The sequences of the murine scFv fragments (SEQ ID NOS: 98, 109, 111 and 114) are provided below in Table 3. Full CAR constructs were generated using SEQ ID NOs: 98, 109, 111 and 114 with additional sequences, SEQ ID NOs: 13-17, shown below, to generate full CAR constructs with SEQ ID NOs: 58, 110, 112, 113 and 115.

[0300] The sequences of the humanized scFv fragments (SEQ ID NOS: 1-12) are provided below in Table 2. Full CAR constructs were generated using SEQ ID NOs: 1-12 with additional sequences, SEQ ID NOs: 13-17, shown below, to generate full CAR constructs with SEQ ID NOs: 31-42.

leader (amino acid sequence)
(SEQ ID NO: 13)
MALPVTALLLPLALLLHAARP
leader (nucleic acid sequence)
(SEQ ID NO: 54)
ATGGCCCTGCCTGTGACAGCCCTGCTGCTGCCTCTGGCTCTGCTGCTGCATGCCGCT
AGACCC
CD8 hinge (amino acid sequence)
(SEQ ID NO: 14)
TTTPAPRPPTPAPTIASQPLSLRPEACRPAAGGAVHTRGLDFACD
CD8 hinge (nucleic acid sequence)
(SEQ ID NO: 55)
ACCACGACGCCAGCGCCGCGACCACCAACACCGGCGCCCACCATCGCGTCGCAGCC
CCTGTCCCTGCGCCCAGAGGCGTGCCGGCCAGCGGCGGGGGGCGCAGTGCACACGA
GGGGGCTGGACTTCGCCTGTGAT
CD8 transmembrane (amino acid sequence)
(SEQ ID NO: 15)
IYIWAPLAGTCGVLLLSLVITLYC
transmembrane (nucleic acid sequence)
(SEQ ID NO: 56)
ATCTACATCTGGGCGCCCTTGGCCGGGACTTGTGGGGTCCTTCTCCTGTCACTGGTT
ATCACCCTTTACTGC
4-1BB Intracellular domain (amino acid sequence)
(SEQ ID NO: 16)
KRGRKKLLYIFKQPFMRPVQTTQEEDGCSCRFPEEEEGGCEL
4-1BB Intracellular domain (nucleic acid sequence)
(SEQ ID NO: 60)
AAACGGGGCAGAAAGAAACTCCTGTATATATTCAAACAACCATTTATGAGACCAGT
ACAAACTACTCAAGAGGAAGATGGCTGTAGCTGCCGATTTCCAGAAGAAGAAGAA
GGAGGATGTGAACTG
CD3 zeta domain (amino acid sequence)
(SEQ ID NO: 17)
RVKFSRSADAPAYKQGQNQLYNELNLGRREEYDVLDKRRGRDPEMGGKPRRKNPQEG
LYNELQKDKMAEAYSEIGMKGERRRGKGHDGLYQGLSTATKDTYDALHMQALPPR
CD3 zeta (nucleic acid sequence)
(SEQ ID NO: 101)
AGAGTGAAGTTCAGCAGGAGCGCAGACGCCCCCGCGTACAAGCAGGGCCAGAACC
AGCTCTATAACGAGCTCAATCTAGGACGAAGAGAGGAGTACGATGTTTTGGACAAG
AGACGTGGCCGGGACCCTGAGATGGGGGGAAAGCCGAGAAGGAAGAACCCTCAGG
AAGGCCTGTACAATGAACTGCAGAAAGATAAGATGGCGGAGGCCTACAGTGAGAT
TGGGATGAAAGGCGAGCGCCGGAGGGGCAAGGGGCACGATGGCCTTTACCAGGGT
CTCAGTACAGCCACCAAGGACACCTACGACGCCCTTCACATGCAGGCCCTGCCCCC
TCGC
CD3 zeta domain (amino acid sequence;
NCBI Reference Sequence NM_000734.3)
(SEQ ID NO: 43)
RVKFSRSADAPAYQQGQNQLYNELNLGRREEYDVLDKRRGRDPEMGGKPRRKNPQEG
LYNELQKDKMAEAYSEIGMKGERRRGKGHDGLYQGLSTATKDTYDALHMQALPPR
CD3 zeta (nucleic acid sequence;
NCBI Reference Sequence NM_000734.3);
(SEQ ID NO: 44)
AGAGTGAAGTTCAGCAGGAGCGCAGACGCCCCCGCGTACCAGCAGGGCCAG
AACCAGCTCTATAACGAGCTCAATCTAGGACGAAGAGAGGAGTACGATGTTT
TGGACAAGAGACGTGGCCGGGACCCTGAGATGGGGGGAAAGCCGAGAAGGA
AGAACCCTCAGGAAGGCCTGTACAATGAACTGCAGAAAGATAAGATGGCGG
AGGCCTACAGTGAGATTGGGATGAAAGGCGAGCGCCGGAGGGGCAAGGGGC
ACGATGGCCTTTACCAGGGTCTCAGTACAGCCACCAAGGACACCTACGACGC
CCTTCACATGCAGGCCCTGCCCCCTCGC
CD28 domain (amino acid sequence, SEQ ID NO: 1317)
RSKRSRLLHSDYMNMTPRRPGPTRKHYQPYAPPRDFAAYRS
CD28 domain (nucleotide sequence, SEQ ID NO: 1318)
AGGAGTAAGAGGAGCAGGCTCCTGCACAGTGACTACATGAACATGACTCCCCGCCG
CCCCGGGCCCACCCGCAAGCATTACCAGCCCTATGCCCCACCACGCGACTTCGCAG
CCTATCGCTCC
Wild-type ICOS domain (amino acid sequence,
SEQ ID NO: 1319)
TKKKYSSSVHDPNGEYMFMRAVNTAKKSRLTDVTL
Wild-type ICOS domain (nucleotide sequence,
SEQ ID NO: 1320)
ACAAAAAAGAAGTATTCATCCAGTGTGCACGACCCTAACGGTGAATACATGTTCAT
GAGAGCAGTGAACACAGCCAAAAAATCCAGACTCACAGATGTGACCCTA
Y to F mutant ICOS domain (amino acid sequence,
SEQ ID NO: 1321)
TKKKYSSSVHDPNGEFMFMRAVNTAKKSRLTDVTL
IgG4 Hinge (amino acid sequence)
(SEQ ID NO: 102)
ESKYGPPCPPCPAPEFLGGPSVFLFPPKPKDTLMISRTPEVTCVVVDVSQEDPEVQFNWY
VDGVEVHNAKTKPREEQFNSTYRVVSVLTVLHQDWLNGKEYKCKVSNKGLPSSIEKTI
SKAKGQPREPQVYTLPPSQEEMTKNQVSLTCLVKGFYPSDIAVEWESNGQPENNYKTTP
PVLDSDGSFFLYSRLTVDKSRWQEGNVFSCSVMHEALHNHYTQKSLSLSLGKM
IgG4 Hinge (nucleotide sequence)
(SEQ ID NO: 103)
GAGAGCAAGTACGGCCCTCCCTGCCCCCCTTGCCCTGCCCCCGAGTTCCTGGGCGGA
CCCAGCGTGTTCCTGTTCCCCCCCAAGCCCAAGGACACCCTGATGATCAGCCGGACC
CCCGAGGTGACCTGTGTGGTGGTGGACGTGTCCCAGGAGGACCCCGAGGTCCAGTT
CAACTGGTACGTGGACGGCGTGGAGGTGCACAACGCCAAGACCAAGCCCCGGGAG
GAGCAGTTCAATAGCACCTACCGGGTGGTGTCCGTGCTGACCGTGCTGCACCAGGA
CTGGCTGAACGGCAAGGAATACAAGTGTAAGGTGTCCAACAAGGGCCTGCCCAGCA
GCATCGAGAAAACCATCAGCAAGGCCAAGGGCCAGCCTCGGGAGCCCCAGGTGTA
CACCCTGCCCCCTAGCCAAGAGGAGATGACCAAGAACCAGGTGTCCCTGACCTGCC
TGGTGAAGGGCTTCTACCCCAGCGACATCGCCGTGGAGTGGGAGAGCAACGGCCAG
CCCGAGAACAACTACAAGACCACCCCCCCTGTGCTGGACAGCGACGGCAGCTTCTT
CCTGTACAGCCGGCTGACCGTGGACAAGAGCCGGTGGCAGGAGGGCAACGTCTTTA
GCTGCTCCGTGATGCACGAGGCCCTGCACAACCACTACACCCAGAAGAGCCTGAGC
CTGTCCCTGGGCAAGATG

[0301] The CAR scFv fragments were then cloned into lentiviral vectors to create a full length CAR construct in a single coding frame, and using the EF1 alpha promoter for expression (SEQ ID NO: 100).

EF-1 alpha promoter

(SEQ ID NO: 100)

CGTGAGGCTCCGGTGCCCGTCAGTGGGCAGAGCGCACATCGCCCACAGTC
CCCGAGAAGTTGGGGGGAGGGGTCGGCAATTGAACCGGTGCCTAGAGAAG
GTGGCGCGGGGTAAACTGGGAAAGTGATGTCGTGTACTGGCTCCGCCTTT
TTCCCGAGGGTGGGGGAGAACCGTATATAAGTGCAGTAGTCGCCGTGAAC
GTTCTTTTTCGCAACGGGTTTGCCGCCAGAACACAGGTAAGTGCCGTGTG
TGGTTCCCGCGGGCCTGGCCTCTTTACGGGTTATGGCCCTTGCGTGCCTT
GAATTACTTCCACCTGGCTGCAGTACGTGATTCTTGATCCCGAGCTTCGG
GTTGGAAGTGGGTGGGAGAGTTCGAGGCCTTGCGCTTAAGGAGCCCCTTC
GCCTCGTGCTTGAGTTGAGGCCTGGCCTGGGCGCTGGGGCCGCCGCGTGC
GAATCTGGTGGCACCTTCGCGCCTGTCTCGCTGCTTTCGATAAGTCTCTA
GCCATTTAAAATTTTTGATGACCTGCTGCGACGCTTTTTTTCTGGCAAGA
TAGTCTTGTAAATGCGGGCCAAGATCTGCACACTGGTATTTCGGTTTTTG
GGGCCGCGGGCGGCGACGGGGCCCGTGCGTCCCAGCGCACATGTTCGGCG
AGGCGGGGCCTGCGAGCGCGGCCACCGAGAATCGGACGGGGGTAGTCTCA
AGCTGGCCGGCCTGCTCTGGTGCCTGGCCTCGCGCCGCCGTGTATCGCCC
CGCCCTGGGCGGCAAGGCTGGCCCGGTCGGCACCAGTTGCGTGAGCGGAA
AGATGGCCGCTTCCCGGCCCTGCTGCAGGGAGCTCAAAATGGAGGACGCG
GCGCTCGGGAGAGCGGGCGGGTGAGTCACCCACACAAAGGAAAAGGGCCT
TTCCGTCCTCAGCCGTCGCTTCATGTGACTCCACGGAGTACCGGGCGCCG
TCCAGGCACCTCGATTAGTTCTCGAGCTTTTGGAGTACGTCGTCTTTAGG
TTGGGGGGAGGGGTTTTATGCGATGGAGTTTCCCCACACTGAGTGGGTGG
AGACTGAAGTTAGGCCAGCTTGGCACTTGATGTAATTCTCCTTGGAATTT
GCCCTTTTTGAGTTTGGATCTTGGTTCATTCTCAAGCCTCAGACAGTGGT
TCAAAGTTTTTTTCTTCCATTTCAGGTGTCGTGA.

[0302] In embodiments, these clones contain a Q/K residue change in the signal domain of the co-stimulatory domain derived from 4-1BB.

[0303] In one aspect, the anti-CD19 binding domain, e.g., humanized scFv, portion of a CAR of the invention is encoded by a transgene whose sequence has been codon optimized for expression in a mammalian cell. In one aspect, entire CAR construct of the invention is encoded by a transgene whose entire sequence has been codon optimized for expression in a mammalian cell. Codon optimization refers to the discovery that the frequency of occurrence of synonymous codons (i.e., codons that code for the same amino acid) in coding DNA is biased in different species. Such codon degeneracy allows an identical polypeptide to be encoded by a variety of nucleotide sequences. A variety of codon optimization methods is known in the art, and include, e.g., methods disclosed in at least U.S. Pat. Nos. 5,786,464 and 6,114,148.

[0304] The present disclosure encompasses, but is not limited to, a recombinant DNA construct comprising sequences encoding a CAR, wherein the CAR comprises an antibody or antibody fragment that binds specifically to CD19, wherein the sequence of the antibody fragment is contiguous with and in the same reading frame as a nucleic acid sequence encoding an intracellular signaling domain. The intracellular signaling domain can comprise a costimulatory signaling domain and/or a primary signaling domain, e.g., a zeta chain. The costimulatory signaling domain refers to a portion of the CAR comprising at least a portion of the intracellular domain of a costimulatory molecule. In one embodiment, the antigen binding domain is a murine antibody or antibody fragment described herein. In one embodiment, the antigen binding domain is a humanized antibody or antibody fragment.

[0305] In specific aspects, a CAR construct of the invention comprises a scFv domain selected from the group consisting of SEQ ID NOS:1-12 or an scFV domain of SEQ ID NO:59, wherein the scFv may be preceded by an optional leader sequence such as provided in SEQ ID NO: 13, and followed by an optional hinge sequence such as provided in SEQ ID NO:14 or SEQ ID NO:45 or SEQ ID NO:47 or SEQ ID NO:49, a transmembrane region such as provided in SEQ ID NO:15, an intracellular signalling domain that includes SEQ ID NO:16 or SEQ ID NO:51 and a CD3 zeta sequence that includes SEQ ID NO:17 or SEQ ID NO:43, wherein the domains are contiguous with and in the same reading frame to form a single fusion protein.

[0306] Also included in the invention (among other things) is a nucleotide sequence that encodes the polypeptide of each of the scFv fragments selected from the group consisting of SEQ IS NO:1, SEQ ID NO:2, SEQ ID NO:3, SEQ ID NO:4, SEQ ID NO:5, SEQ IS NO:6, SEQ ID NO:7, SEQ ID NO:8, SEQ ID NO:9, SEQ ID NO:10, SEQ ID NO:11, SEQ ID NO:12 and SEQ ID NO:59. Also included in the invention (among other things) is a nucleotide sequence that encodes the polypeptide of each of the scFv fragments selected from the group consisting of SEQ IS NO:1, SEQ ID NO:2, SEQ ID NO:3, SEQ ID NO:4, SEQ ID NO:5, SEQ ID NO:6, SEQ ID NO:7, SEQ ID NO:8, SEQ ID NO:9, SEQ ID NO:10, SEQ ID NO:11, SEQ ID NO:12 and SEQ ID NO:59, and each of the domains of SEQ ID NOS: 13-17, plus an encoded CD19 CAR fusion protein of the invention. In one aspect an exemplary CD19 CAR constructs comprise an optional leader sequence, an extracellular antigen binding domain, a hinge, a transmembrane domain, and an intracellular stimulatory domain. In one aspect an exemplary CD19 CAR construct comprises an optional leader sequence, an extracellular antigen binding domain, a hinge, a transmembrane domain, an intracellular costimulatory domain and an intracellular stimulatory domain. In some embodiments, specific CD19 CAR constructs containing humanized scFv domains of the invention are provided as SEQ ID NOS: 31-42, or a murine scFv domain as provided as SEQ ID NO:59.

[0307] In one aspect the nucleic acid sequence of a CAR construct of the invention is selected from one or more of SEQ ID NOS:85-96. In one aspect the nucleic acid sequence of a CAR construct is SEQ ID NO:85. In one aspect the nucleic acid sequence of a CAR construct is SEQ ID NO:86. In one aspect the nucleic acid sequence of a CAR construct is SEQ ID NO:87. In one aspect the nucleic acid sequence of a CAR construct is SEQ ID NO:88. In one aspect the nucleic acid sequence of a CAR construct is SEQ ID NO:89. In one aspect the nucleic acid sequence of a CAR construct is SEQ ID NO:90. In one aspect the nucleic acid sequence of a CAR construct is SEQ ID NO:91. In one aspect the nucleic acid sequence of a CAR construct is SEQ ID NO:92. In one aspect the nucleic acid sequence of a CAR construct is SEQ ID NO:93. In one aspect the nucleic acid sequence of a CAR construct is SEQ ID NO:94. In one aspect the nucleic acid sequence of a CAR construct is SEQ ID NO:95. In one aspect the nucleic acid sequence of a CAR construct is SEQ ID NO:96. In one aspect the nucleic acid sequence of a CAR construct is SEQ ID NO:97. In one aspect the nucleic acid sequence of a CAR construct is SEQ ID NO:98. In one aspect the nucleic acid sequence of a CAR construct is SEQ ID NO:99.

[0308] Full-length CAR sequences are also provided herein as SEQ ID NOS: 31-42 and 58, as shown in Table 2 (e.g., CTL119) and Table 3 (e.g., CTL019).

[0309] An exemplary leader sequence is provided as SEQ ID NO: 13. An exemplary hinge/spacer sequence is provided as SEQ ID NO: 14 or SEQ ID NO:45 or SEQ ID NO:47 or SEQ ID NO:49. An exemplary transmembrane domain sequence is provided as SEQ ID NO:15. An exemplary sequence of the intracellular signaling domain of the 4-1BB protein is provided as SEQ ID NO: 16. An exemplary sequence of the intracellular signaling domain of CD27 is provided as SEQ ID NO:51. An exemplary CD3zeta domain sequence is provided as SEQ ID NO: 17 or SEQ ID NO:43. These sequences may be used, e.g., in combination with an scFv that recognizes one or more of CD19, CD10, CD20, CD22, CD34, CD123, FLT-3, or ROR1.

[0310] Exemplary sequences of various scFv fragments and other CAR components are provided herein. It is noted that these CAR components (e.g., of SEQ ID NO: 121, or a sequence of Table 2, 3, 6, 11A, 11B, 16, or 25) without a leader sequence (e.g., without the amino acid sequence of SEQ ID NO: 13 or a nucleotide sequence of SEQ ID NO: 54), are also provided herein.

[0311] In embodiments, the CAR sequences described herein contain a Q/K residue change in the signal domain of the co-stimulatory domain derived from CD3zeta chain.

[0312] In one aspect, the present invention encompasses a recombinant nucleic acid construct comprising a nucleic acid molecule encoding a CAR, wherein the nucleic acid molecule comprises the nucleic acid sequence encoding an anti-CD19 binding domain, e.g., described herein, that is contiguous with and in the same reading frame as a nucleic acid sequence encoding an intracellular signaling domain. In one aspect, the anti-CD19 binding domain is selected from one or more of SEQ ID NOS:1-12 and 58. In one aspect, the anti-CD19 binding domain is encoded by a nucleotide residues 64 to 813 of the sequence provided in one or more of SEQ ID NOS:61-72 and 97. In one aspect, the anti-CD19 binding domain is encoded by a nucleotide residues 64 to 813 of SEQ ID NO:61. In one aspect, the anti-CD19 binding domain is encoded by a nucleotide residues 64 to 813 of SEQ ID NO:62. In one aspect, the anti-CD19 binding domain is encoded by a nucleotide residues 64 to 813 of SEQ ID NO:63. In one aspect, the anti-CD19 binding domain is encoded by a nucleotide residues 64 to 813 of SEQ ID NO:64. In one aspect, the anti-CD19 binding domain is encoded by a nucleotide residues 64 to 813 of SEQ ID NO:65. In one aspect, the anti-CD19 binding domain is encoded by a nucleotide residues 64 to 813 of SEQ ID NO:66. In one aspect, the anti-CD19 binding domain is encoded by a nucleotide residues 64 to 813 of SEQ ID NO:67. In one aspect, the anti-CD19 binding domain is encoded by a nucleotide residues 64 to 813 of SEQ ID NO:68. In one aspect, the anti-CD19 binding domain is encoded by a nucleotide residues 64 to 813 of SEQ ID NO:69. In one aspect, the anti-CD19 binding domain is encoded by a nucleotide residues 64 to 813 of SEQ ID NO:70. In one aspect, the anti-CD19 binding domain is encoded by a nucleotide residues 64 to 813 of SEQ ID NO:71. In one aspect, the anti-CD19 binding domain is encoded by a nucleotide residues 64 to 813 of SEQ ID NO:72.

TABLE 2
Humanized CD19 CAR Constructs

| | | |
|---|---|---|
| | SEQ | |
| Name | ID | Sequence |

CAR 1

| | | |
|---|---|---|
| CAR1 | 1 | EIVMTQSPATLSLSPGERATLSCRASQDISKYLNWYQQKPGQA |
| scFv | | PRLLIYHTSRLHSGIPARFSGSGSGTDYTLTISSLQPEDFAVYFC |
| domain | | QQGNTLPYTFGQGTKLEIKGGGGSGGGGSGGGGSQVQLQESG |
| | | PGLVKPSETLSLTCTVSGVSLPDYGVSWIRQPPGKGLEWIGVI |
| | | WGSETTYYSSSLKSRVTISKDNSKNQVSLKLSSVTAADTAVYY |
| | | CAKHYYYGGSYAMDYWGQGTLVTVSS |
| 103101 | 61 | atggccctccctgtcaccgccctgctgcttccgctggctcttctgctccacgccgctcggcccgaaa |
| CAR1 | | ttgtgatgacccagtcacccgccactcttagcctttcacccggtgagcgcgcaaccctgtcttgcag |
| Soluble | | agcctcccaagacatctcaaaataccttaattggtatcaacagaagcccggacaggctcctcgcctt |
| scFv-nt | | ctgatctaccacaccagccggctccattctggaatccctgccaggttcagcggtagcggatctggg |
| | | accgactacaccctcactatcagctcactgcagccagaggacttcgctgtctatttctgtcagcaagg |
| | | gaacaccctgccctacacctttggacagggcaccaagctcgagattaaaggtggaggtggcagcg |
| | | gaggaggtgggtccggcggtggaggaagccaggtccaactccaagaaagcggaccgggtcttg |
| | | tgaagccatcagaaactctttcactgacttgtactgtgagcggagtgtctctccccgattacggggtgt |
| | | cttggatcagacagccaccggggaagggtctggaatggattggagtgatttggggctctgagacta |
| | | cttactactcttcatccctcaagtcacgcgtcaccatctcaaaggacaactctaagaatcaggtgtcac |
| | | tgaaactgtcatctgtgaccgcagccgacaccgccgtgtactattgcgctaagcattactattatggc |
| | | gggagctacgcaatggattactggggacagggtactctggtcaccgtgtccagccaccaccatcat |
| | | caccatcaccat |
| 103101 | 73 | MALPVTALLLPLALLLHAARPeivmtqspatlslspgeratlscrasqdiskyl |
| CAR1 | | nwyqqkpgqaprlliyhtsrlhsgiparfsgsgsgtdytltisslqpedfavyfcqqgntlpytfgq |
| Soluble | | gtkleikggggsggggsggggsqvqlqesgpglvkpsetlsltctvsgvslpdygvswirqppg |
| scFv-aa | | kglewigviwgsettyyssslksrvtiskdnsknqvslklssvtaadtavyycakhyyyggsya |
| | | mdywgqgtlvtvsshhhhhhhh |
| 104875 | 85 | atggccctccctgtcaccgccctgctgcttccgctggctcttctgctccacgccgctcggcccgaaa |
| CAR 1- | | ttgtgatgacccagtcacccgccactcttagcctttcacccggtgagcgcgcaaccctgtcttgcag |
| Full-nt | | agcctcccaagacatctcaaaataccttaattggtatcaacagaagcccggacaggctcctcgcctt |
| | | ctgatctaccacaccagccggctccattctggaatccctgccaggttcagcggtagcggatctggg |
| | | accgactacaccctcactatcagctcactgcagccagaggacttcgctgtctatttctgtcagcaagg |
| | | gaacaccctgccctacacctttggacagggcaccaagctcgagattaaaggtggaggtggcagcg |
| | | gaggaggtgggtccggcggtggaggaagccaggtccaactccaagaaagcggaccgggtcttg |
| | | tgaagccatcagaaactctttcactgacttgtactgtgagcggagtgtctctccccgattacggggtgt |
| | | cttggatcagacagccaccggggaagggtctggaatggattggagtgatttggggctctgagacta |
| | | cttactactcttcatccctcaagtcacgcgtcaccatctcaaaggacaactctaagaatcaggtgtcac |
| | | tgaaactgtcatctgtgaccgcagccgacaccgccgtgtactattgcgctaagcattactattatggc |
| | | gggagctacgcaatggattactggggacagggtactctggtcaccgtgtccagcaccactacccc |
| | | agcaccgaggccacccaccccggctcctaccatcgcctcccagcctctgtccctgcgtccggagg |
| | | catgtagacccgcagctggtggggccgtgcatacccggggtcttgacttcgcctgcgatatctacat |
| | | ttgggcccctctggctggtacttgcggggtcctgctgctttcactcgtgatcactctttactgtaagcgc |
| | | ggtcggaagaagctgctgtacatctttaagcaacccttcatgaggcctgtgcagactactcaagagg |
| | | aggacggctgttcatgccggttcccagaggaggaggaaggcggctgcgaactgcgcgtgaaatt |
| | | cagccgcagcgcagatgctccagcctacaagcaggggcagaaccagctctacaacgaactcaat |
| | | cttggtcggagagaggagtacgacgtgctggacaagcggagaggacgggacccagaaatgggc |
| | | gggaagccgcgcagaaagaatccccaagagggcctgtacaacgagctccaaaaggataagatg |
| | | gcagaagcctatagcgagattggtatgaaaggggaacgcagaagaggcaaaggccacgacgga |
| | | ctgtaccagggactcagcaccgccaccaaggacacctatgacgctcttcacatgcaggccctgcc |
| | | gcctcgg |
| 104875 | 31 | MALPVTALLLPLALLLHAARPeivmtqspatlslspgeratlscrasgdiskyln |
| CAR 1- | | wyqqkpgqaprlliyhtsrlhsgiparfsgsgsgtdytltisslqpedfavyfcqqgntlpytfgq |
| Full-aa | | gtkleikggggsggggsggggsqvqlqesgpglvkpsetlsltctvsgvslpdygvswirqppg |
| | | kglewigviwgsettyyssslksrvtiskdnsknqvslklssvtaadtavyycakhyyyggsva |
| | | mdywgqgtlvtvsstttpaprpptpaptiasqplslrpeacrpaaggavhtrgldfacdiyiwapl |
| | | agtcgvlllslvitlyckrgrkkllyifkqpfmrpvqttqeedgcscrfpeeeeggcelrvkfsrsad |
| | | apaykqgqnqlynelnlgrreeydvldkrrgrdpemggkprrknpqeglynelqkdkmaea |
| | | yseigmkgerrrgkghdglyqglstatkdtydalhmqalppr |

CAR 2

| | | |
|---|---|---|
| CAR2 | 2 | eivmtqspatlslspgeratlscrasqdiskylnwyqqkpgqaprlliyhtsrlhsgiparfsgsgs |
| scFv | | gtdytltisslqpedfavyfcqqgntlpytfgqgtkleikggggsggggsggggsqvqlqesgpg |
| domain | | lvkpsetlsltctvsgvslpdygvswirqppgkglewigviwgsettyyqsslksrvtiskdnskn |
| | | qvslklssvtaadtavyycakhyyyggsyamdywgqgtlvtvss |
| 103102 | 62 | atggccctccctgtcaccgccctgctgcttccgctggctcttctgctccacgccgctcggcccgaaa |
| CAR2- | | ttgtgatgacccagtcacccgccactcttagcctttcacccggtgagcgcgcaaccctgtcttgcag |
| Soluble | | agcctcccaagacatctcaaaataccttaattggtatcaacagaagcccggacaggctcctcgcctt |
| scFv-nt | | ctgatctaccacaccagccggctccattctggaatccctgccaggttcagcggtagcggatctggg |
| | | accgactacaccctcactatcagctcactgcagccagaggacttcgctgtctatttctgtcagcaagg |
| | | gaacaccctgccctacacctttggacagggcaccaagctcgagattaaaggtggaggtggcagcg |
| | | gaggaggtgggtccggcggtggaggaagccaggtccaactccaagaaagcggaccgggtcttg |
| | | tgaagccatcagaaactctttcactgacttgtactgtgagcggagtgtctctccccgattacggggtgt |
| | | cttggatcagacagccaccggggaagggtctggaatggattggagtgatttggggctctgagacta |
| | | cttactaccaatcatccctcaagtcacgcgtcaccatctcaaaggacaactctaagaatcaggtgtca |
| | | ctgaaactgtcatctgtgaccgcagccgacaccgccgtgtactattgcgctaagcattactattatgg |
| | | cgggagctacgcaatggattactggggacagggtactctggtcaccgtgtccagccaccaccatc |
| | | atcaccatcaccat |
| 103102 | 74 | MALPVTALLLPLALLLHAARPeivmtqspatlslspgeratlscrasqdiskyl |
| CAR2- | | nwyqqkpgqaprlliyhtsrlhsgiparfsgsgsgtdytltisslqpedfavyfcqqgntlpytfgq |
| Soluble | | gtkleikggggsggggsggggsqvqlqesgpglvkpsetlsltctvsgvslpdygvswirqppg |
| scFv-aa | | kglewigviwgsettyyqsslksrvtiskdnsknqvslklssvtaadtavyycakhyyyggsya |
| | | mdywgqgtlvtvsshhhhhhhh |
| 104876 | 86 | atggccctccctgtcaccgccctgctgcttccgctggctcttctgctccacgccgctcggcccgaaa |
| CAR 2- | | ttgtgatgacccagtcacccgccactcttagcctttcacccggtgagcgcgcaaccctgtcttgcag |
| Full-nt | | agcctcccaagacatctcaaaataccttaattggtatcaacagaagcccggacaggctcctcgcctt |
| (also | | ctgatctaccacaccagccggctccattctggaatccctgccaggttcagcggtagcggatctggg |
| referred to | | accgactacaccctcactatcagctcactgcagccagaggacttcgctgtctatttctgtcagcaagg |
| herein as | | gaacaccctgccctacacctttggacagggcaccaagctcgagattaaaggtggaggtggcagcg |
| CTL119 | | gaggaggtgggtccggcggtggaggaagccaggtccaactccaagaaagcggaccgggtcttg |
| nucleotide | | tgaagccatcagaaactctttcactgacttgtactgtgagcggagtgtctctccccgattacggggtgt |
| sequence) | | cttggatcagacagccaccggggaagggtctggaatggattggagtgatttggggctctgagacta |
| | | cttactaccaatcatccctcaagtcacgcgtcaccatctcaaaggacaactctaagaatcaggtgtca |
| | | ctgaaactgtcatctgtgaccgcagccgacaccgccgtgtactattgcgctaagcattactattatgg |
| | | cgggagctacgcaatggattactggggacagggtactctggtcaccgtgtccagcaccactaccc |
| | | cagcaccgaggccacccaccccggctcctaccatcgcctcccagcctctgtccctgcgtccggag |
| | | gcatgtagacccgcagctggtggggccgtgcatacccggggtcttgacttcgcctgcgatatctac |
| | | atttgggcccctctggctggtacttgcggggtcctgctgctttcactcgtgatcactctttactgtaagc |
| | | gcggtcggaagaagctgctgtacatctttaagcaacccttcatgaggcctgtgcagactactcaaga |
| | | ggaggacggctgttcatgccggttcccagaggaggaggaaggcggctgcgaactgcgcgtgaa |
| | | attcagccgcagcgcagatgctccagcctacaagcaggggcagaaccagctctacaacgaactc |
| | | aatcttggtcggagagaggagtacgacgtgctggacaagcggagaggacgggacccagaaatg |
| | | ggcgggaagccgcgcagaaagaatccccaagagggcctgtacaacgagctccaaaaggataag |
| | | atggcagaagcctatagcgagattggtatgaaaggggaacgcagaagaggcaaaggccacgac |
| | | ggactgtaccagggactcagcaccgccaccaaggacacctatgacgctcttcacatgcaggccct |
| | | gccgcctcgg |
| 104876 | 32 | MALPVTALLLPLALLLHAARPeivmtqspatlslspgeratlscrasadiskyln |
| CAR 2- | | wyqqkpgqaprlliyhtsrlhsgiparfsgsgsgtdytltisslqpedfavyfcqqgntlpytfgq |
| Full-aa | | gtkleikggggsggggsggggsqvqlqesgpglvkpsetlsltctvsgvslpdygvswirqppg |
| (also | | kglewigviwgsettyyqsslksrvtiskdnsknqvslklssvtaadtavyycakhyyyggsy |
| referred to | | amdywgqgtlvtvsstttpaprpptpaptiasqplslrpeacrpaaggavhtrgldfacdiyiwa |
| herein as | | plagtcgvlllslvitlyckrgrkkllyifkqpfmrpvqttqeedgcscrfpeeeeggcelrvkfsrs |
| CTL119 | | adapaykqgqnqlynelnlgrreeydvldkrrgrdpemggkprrknpqeglynelqkdkma |
| amino acid | | eayseigmkgerrrgkghdglyqglstatkdtydalhmqalppr |
| sequence) | | |

CAR 3

| | | |
|---|---|---|
| CAR3 | 3 | qvqlqesgpglvkpsetlsltctvsgvslpdygvswirqppgkglewigviwgsettyyssslks |
| scFv | | rvtiskdnsknqvslklssvtaadtavyycakhyyyggsyamdywgqgtlvtvssggggsgg |
| domain | | ggsggggseivmtqspatlslspgeratlscrasqdiskylnwyqqkpgqaprlliyhtsrlhsgi |
| | | parfsgsgsgtdytltisslqpedfavyfcqqgntlpytfgqgtkleik |
| 103104 | 63 | atggctctgcccgtgaccgcactcctcctgccactggctctgctgcttcacgccgctcgcccacaag |
| CAR 3- | | tccagcttcaagaatcagggcctggtctggtgaagccatctgagactctgtccctcacttgcaccgtg |
| Soluble | | agcggagtgtccctcccagactacggagtgagctggattagacagcctcccggaaagggactgg |
| scFv-nt | | agtggatcggagtgatttggggtagcgaaaccacttactattcatcttccctgaagtcacgggtcacc |
| | | atttcaaaggataactcaaagaatcaagtgagcctcaagctctcatcagtcaccgccgctgacaccg |
| | | ccgtgtattactgtgccaagcattactactatggagggtcctacgccatggactactggggccaggg |
| | | aactctggtcactgtgtcatctggtggaggaggtagcggaggaggcgggagcggtggaggtggc |
| | | tccgaaatcgtgatgacccagagccctgcaaccctgtccctttctcccggggaacgggctacccttt |
| | | cttgtcgggcatcacaagatatctcaaaatacctcaattggtatcaacagaagccgggacaggccc |
| | | ctaggcttcttatctaccacacctctcgcctgcatagcgggattcccgcacgctttagcgggtctgga |
| | | agcgggaccgactacactctgaccatctcatctctccagcccgaggacttcgccgtctacttctgcc |
| | | agcagggtaacaccctgccgtacaccttcggccagggcaccaagcttgagatcaaacatcaccac |
| | | catcatcaccatcac |
| 103104 | 75 | MALPVTALLLPLALLLHAARPqvqlqesgpglvkpsetlsltctvsgvslpdy |
| CAR 3- | | gvswirqppgkglewigviwgsettyyssslksrvtiskdnsknqvslklssvtaadtavyycak |
| Soluble | | hyyyggsyamdywgqgtlvtvssggggsggggsggggseivmtqspatlslspgeratlscra |
| scFv-aa | | sqdiskylnwyqqkpgqaprlliyhtsrlhsgiparfsgsgsgtdytltisslqpedfavyfcqqgn |
| | | tlpytfgqgtkleikhhhhhhhh |
| 104877 | 87 | atggctctgcccgtgaccgcactcctcctgccactggctctgctgcttcacgccgctcgcccacaag |
| CAR 3- | | tccagcttcaagaatcagggcctggtctggtgaagccatctgagactctgtccctcacttgcaccgtg |
| Full-nt | | agcggagtgtccctcccagactacggagtgagctggattagacagcctcccggaaagggactgg |
| | | agtggatcggagtgatttggggtagcgaaaccacttactattcatcttccctgaagtcacgggtcacc |
| | | atttcaaaggataactcaaagaatcaagtgagcctcaagctctcatcagtcaccgccgctgacaccg |
| | | ccgtgtattactgtgccaagcattactactatggagggtcctacgccatggactactggggccaggg |
| | | aactctggtcactgtgtcatctggtggaggaggtagcggaggaggcgggagcggtggaggtggc |
| | | tccgaaatcgtgatgacccagagccctgcaaccctgtccctttctcccggggaacgggctacccttt |
| | | cttgtcgggcatcacaagatatctcaaaatacctcaattggtatcaacagaagccgggacaggccc |
| | | ctaggcttcttatctaccacacctctcgcctgcatagcgggattcccgcacgctttagcgggtctgga |
| | | agcgggaccgactacactctgaccatctcatctctccagcccgaggacttcgccgtctacttctgcc |
| | | agcagggtaacaccctgccgtacaccttcggccagggcaccaagcttgagatcaaaaccactact |
| | | cccgctccaaggccacccacccctgccccgaccatcgcctctcagccgctttccctgcgtccgga |
| | | ggcatgtagacccgcagctggtggggccgtgcatacccggggtcttgacttcgcctgcgatatcta |
| | | catttgggcccctctggctggtacttgcggggtcctgctgctttcactcgtgatcactctttactgtaag |
| | | cgcggtcggaagaagctgctgtacatctttaagcaacccttcatgaggcctgtgcagactactcaag |
| | | aggaggacggctgttcatgccggttcccagaggaggaggaaggcggctgcgaactgcgcgtga |
| | | aattcagccgcagcgcagatgctccagcctacaagcaggggcagaaccagctctacaacgaact |
| | | caatcttggtcggagagaggagtacgacgtgctggacaagcggagaggacgggacccagaaat |
| | | gggcgggaagccgcgcagaaagaatccccaagagggcctgtacaacgagctccaaaaggataa |
| | | gatggcagaagcctatagcgagattggtatgaaaggggaacgcagaagaggcaaaggccacga |
| | | cggactgtaccagggactcagcaccgccaccaaggacacctatgacgctcttcacatgcaggccc |
| | | tgccgcctcgg |
| 104877 | 33 | MALPVTALLLPLALLLHAARPqvqlqesgpglvkpsetlsltctvsgvslpdygv |
| CAR 3- | | swirqppgkglewigviwgsettyyssslksrvtiskdnsknqvslklssvtaadtavyycakh |
| Full-aa | | yyyggsyamdywgqgtlvtvssggggsggggsggggseivmtqspatlslspgeratlscra |
| | | sqdiskylnwyqqkpgqaprlliyhtsrlhsgiparfsgsgsgtdytltisslqpedfavyfcqq |
| | | gntlpytfgqgtkleiktttpaprpptpaptiasqplslrpeacrpaaggavhtrgldfacdiyiwa |
| | | plagtcgvlllslvitlyckrgrkkllyifkqpfmrpvqttqeedgcscrfpeeeeggcelrvkfsrs |
| | | adapaykqgqnqlynelnlgrreeydvldkrrgrdpemggkprrknpqeglynelqkdkma |
| | | eayseigmkgerrrgkghdglyqglstatkdtydalhmqalppr |

CAR 4

| | | |
|---|---|---|
| CAR4 | 4 | qvqlqesgpglvkpsetlsltctvsgvslpdygvswirqppgkglewigviwgsettyyqsslks |
| scFv | | rvtiskdnsknqvslklssvtaadtavyycakhyyyggsyamdywgqgtlvtvssggggsgg |
| domain | | ggsggggseivmtqspatlslspgeratlscrasqdiskylnwyqqkpgqaprlliyhtsrlhsgi |
| | | parfsgsgsgtdytltisslqpedfavyfcqqgntlpytfgqgtkleik |
| 103106 | 64 | atggctctgcccgtgaccgcactcctcctgccactggctctgctgcttcacgccgctcgcccacaag |
| CAR4- | | tccagcttcaagaatcagggcctggtctggtgaagccatctgagactctgtccctcacttgcaccgtg |
| Soluble | | agcggagtgtccctcccagactacggagtgagctggattagacagcctcccggaaagggactgg |
| scFv-nt | | agtggatcggagtgatttggggtagcgaaaccacttactatcaatcttccctgaagtcacgggtcac |
| | | catttcaaaggataactcaaagaatcaagtgagcctcaagctctcatcagtcaccgccgctgacacc |
| | | gccgtgtattactgtgccaagcattactactatggagggtcctacgccatggactactggggccagg |
| | | gaactctggtcactgtgtcatctggtggaggaggtagcggaggaggcgggagcggtggaggtgg |
| | | ctccgaaatcgtgatgacccagagccctgcaaccctgtccctttctcccggggaacgggctaccctt |
| | | tcttgtcgggcatcacaagatatctcaaaatacctcaattggtatcaacagaagccgggacaggccc |
| | | ctaggcttcttatctaccacacctctcgcctgcatagcgggattcccgcacgctttagcgggtctgga |
| | | agcgggaccgactacactctgaccatctcatctctccagcccgaggacttcgccgtctacttctgcc |
| | | agcagggtaacaccctgccgtacaccttcggccagggcaccaagcttgagatcaaacatcaccac |
| | | catcatcaccatcac |
| 103106 | 76 | MALPVTALLLPLALLLHAARPqvqlqesgpglvkpsetlsltctvsgvslpdy |
| CAR4- | | gvswirqppgkglewigviwgsettyyqsslksrvtiskdnsknqvslklssvtaadtavyyca |
| Soluble | | khyyyggsyamdywgqgtlvtvssggggsggggsggggseivmtqspatlslspgeratlscr |
| scFv-aa | | asqdiskylnwyqqkpgqaprlliyhtsrlhsgiparfsgsgsgtdytltisslqpedfavyfcqqg |
| | | ntlpytfgqgtkleikhhhhhhhh |
| 104878 | 88 | atggctctgcccgtgaccgcactcctcctgccactggctctgctgcttcacgccgctcgcccacaag |
| CAR 4- | | tccagcttcaagaatcagggcctggtctggtgaagccatctgagactctgtccctcacttgcaccgtg |
| Full-nt | | agcggagtgtccctcccagactacggagtgagctggattagacagcctcccggaaagggactgg |
| | | agtggatcggagtgatttggggtagcgaaaccacttactatcaatcttccctgaagtcacgggtcac |
| | | catttcaaaggataactcaaagaatcaagtgagcctcaagctctcatcagtcaccgccgctgacacc |
| | | gccgtgtattactgtgccaagcattactactatggagggtcctacgccatggactactggggccagg |
| | | gaactctggtcactgtgtcatctggtggaggaggtagcggaggaggcgggagcggtggaggtgg |
| | | ctccgaaatcgtgatgacccagagccctgcaaccctgtccctttctcccggggaacgggctaccctt |
| | | tcttgtcgggcatcacaagatatctcaaaatacctcaattggtatcaacagaagccgggacaggccc |
| | | ctaggcttcttatctaccacacctctcgcctgcatagcgggattcccgcacgctttagcgggtctgga |
| | | agcgggaccgactacactctgaccatctcatctctccagcccgaggacttcgccgtctacttctgcc |
| | | agcagggtaacaccctgccgtacaccttcggccagggcaccaagcttgagatcaaaaccactact |
| | | cccgctccaaggccacccacccctgccccgaccatcgcctctcagccgctttccctgcgtccgga |
| | | ggcatgtagacccgcagctggtggggccgtgcatacccggggtcttgacttcgcctgcgatatcta |
| | | catttgggcccctctggctggtacttgcggggtcctgctgctttcactcgtgatcactctttactgtaag |
| | | cgcggtcggaagaagctgctgtacatctttaagcaacccttcatgaggcctgtgcagactactcaag |
| | | aggaggacggctgttcatgccggttcccagaggaggaggaaggcggctgcgaactgcgcgtga |
| | | aattcagccgcagcgcagatgctccagcctacaagcaggggcagaaccagctctacaacgaact |
| | | caatcttggtcggagagaggagtacgacgtgctggacaagcggagaggacgggacccagaaat |
| | | gggcgggaagccgcgcagaaagaatccccaagagggcctgtacaacgagctccaaaaggataa |
| | | gatggcagaagcctatagcgagattggtatgaaaggggaacgcagaagaggcaaaggccacga |
| | | cggactgtaccagggactcagcaccgccaccaaggacacctatgacgctcttcacatgcaggccc |
| | | tgccgcctcgg |
| 104878 | 34 | MALPVTALLLPLALLLHAARPqvqlqesgpglvkpsetlsltctvsgvslpdygv |
| CAR 4- | | swirqppgkglewigviwgsettyyqsslksrvtiskdnsknqvslklssvtaadtavyycakh |
| Full-aa | | yyyggsvamdvwgqgtlvtvssggggsggggsggggseivmtqspatlslspgeratlscra |
| | | sqdiskylnwyqqkpgqaprlliyhtsrlhsgiparfsgsgsgtdvtltisslqpedfavvfcqq |
| | | gntlpytfgqgtkleiktttpaprpptpaptiasqplslrpeacrpaaggavhtrgldfacdiyiwa |
| | | plagtcgvlllslvitlyckrgrkkllyifkqpfmrpvqttqeedgcscrfpeeeeggcelrvkfsrs |
| | | adapaykqgqnqlynelnlgrreeydvldkrrgrdpemggkprrknpqeglynelqkdkma |
| | | eayseigmkgerrrgkghdglyqglstatkdtydalhmqalppr |

CAR 5

| | | |
|---|---|---|
| CAR5 | 5 | eivmtqspatlslspgeratlscrasqdiskylnwyqqkpgqaprlliyhtsrlhsgiparfsgsgs |
| scFv | | gtdytltisslqpedfavyfcqqgntlpytfgqgtkleikggggsggggsggggsggggsqvqlq |
| domain | | esgpglvkpsetlsltctvsgvslpdygvswirqppgkglewigviwgsettyyssslksrvtisk |
| | | dnsknqvslklssvtaadtavyycakhyyyggsyamdywgqgtlvtvss |
| 99789 | 65 | atggccctcccagtgaccgctctgctgctgcctctcgcacttcttctccatgccgctcggcctgagat |
| CAR5- | | cgtcatgacccaaagccccgctaccctgtccctgtcacccggcgagagggcaaccctttcatgcag |
| Soluble | | ggccagccaggacatttctaagtacctcaactggtatcagcagaagccagggcaggctcctcgcct |
| scFv-nt | | gctgatctaccacaccagccgcctccacagcggtatccccgccagattttccgggagcgggtctgg |
| | | aaccgactacaccctcaccatctcttctctgcagcccgaggatttcgccgtctatttctgccagcagg |
| | | ggaatactctgccgtacaccttcggtcaaggtaccaagctggaaatcaagggaggcggaggatca |
| | | ggcggtggcggaagcggaggaggtggctccggaggaggaggttcccaagtgcagcttcaagaa |
| | | tcaggacccggacttgtgaagccatcagaaaccctctccctgacttgtaccgtgtccggtgtgagcc |
| | | tccccgactacggagtctcttggattcgccagcctccggggaagggtcttgaatggattggggtgat |
| | | ttggggatcagagactacttactactcttcatcacttaagtcacgggtcaccatcagcaaagataata |
| | | gcaagaaccaagtgtcacttaagctgtcatctgtgaccgccgctgacaccgccgtgtactattgtgc |
| | | caaacattactattacggagggtcttatgctatggactactggggacaggggaccctggtgactgtct |
| | | ctagccatcaccatcaccaccatcatcac |
| 99789 | 77 | MALPVTALLLPLALLLHAARPeivmtqspatlslspgeratlscrasqdiskyl |
| CAR5- | | nwyqqkpgqaprlliyhtsrlhsgiparfsgsgsgtdytltisslqpedfavyfcqqgntlpytfgq |
| Soluble | | gtkleikggggsggggsggggsggggsqvqlqesgpglvkpsetlsltctvsgvslpdygvswi |
| scFv-aa | | rqppgkglewigviwgsettyyssslksrvtiskdnsknqvslklssvtaadtavyycakhyyy |
| | | ggsyamdywgqgtlvtvsshhhhhhhh |
| 104879 | 89 | atggccctccctgtcaccgccctgctgcttccgctggctcttctgctccacgccgctcggcccgaaa |
| CAR 5- | | ttgtgatgacccagtcacccgccactcttagcctttcacccggtgagcgcgcaaccctgtcttgcag |
| Full-nt | | agcctcccaagacatctcaaaataccttaattggtatcaacagaagcccggacaggctcctcgcctt |
| | | ctgatctaccacaccagccggctccattctggaatccctgccaggttcagcggtagcggatctggg |
| | | accgactacaccctcactatcagctcactgcagccagaggacttcgctgtctatttctgtcagcaagg |
| | | gaacaccctgccctacacctttggacagggcaccaagctcgagattaaaggtggaggtggcagcg |
| | | gaggaggtgggtccggcggtggaggaagcggcggaggcgggagccaggtccaactccaaga |
| | | aagcggaccgggtcttgtgaagccatcagaaactctttcactgacttgtactgtgagcggagtgtctc |
| | | tccccgattacggggtgtcttggatcagacagccaccggggaagggtctggaatggattggagtg |
| | | atttggggctctgagactacttactactcttcatccctcaagtcacgcgtcaccatctcaaaggacaac |
| | | tctaagaatcaggtgtcactgaaactgtcatctgtgaccgcagccgacaccgccgtgtactattgcg |
| | | ctaagcattactattatggcgggagctacgcaatggattactggggacagggtactctggtcaccgt |
| | | gtccagcaccactaccccagcaccgaggccacccaccccggctcctaccatcgcctcccagcctc |
| | | tgtccctgcgtccggaggcatgtagacccgcagctggtggggccgtgcatacccggggtcttgact |
| | | tcgcctgcgatatctacatttgggcccctctggctggtacttgcggggtcctgctgctttcactcgtgat |
| | | cactctttactgtaagcgcggtcggaagaagctgctgtacatctttaagcaacccttcatgaggcctg |
| | | tgcagactactcaagaggaggacggctgttcatgccggttcccagaggaggaggaaggcggctg |
| | | cgaactgcgcgtgaaattcagccgcagcgcagatgctccagcctacaagcaggggcagaaccag |
| | | ctctacaacgaactcaatcttggtcggagagaggagtacgacgtgctggacaagcggagaggac |
| | | gggacccagaaatgggcgggaagccgcgcagaaagaatccccaagagggcctgtacaacgag |
| | | ctccaaaaggataagatggcagaagcctatagcgagattggtatgaaaggggaacgcagaagag |
| | | gcaaaggccacgacggactgtaccagggactcagcaccgccaccaaggacacctatgacgctct |
| | | tcacatgcaggccctgccgcctcgg |
| 104879 | 35 | MALPVTALLLPLALLLHAARPeivmtqspatlslspgeratlscrasqdiskyln |
| CAR 5- | | wyqqkpgqaprlliyhtsrlhsgiparfsgsgsgtdytltisslqpedfavyfcqqgntlpytfgq |
| Full-aa | | gtkleikggggsggggsggggsggggsqvqlqesgpglvkpsetlsltctvsgvslpdygvswi |
| | | rqppgkglewigviwgsettyyssslksrvtiskdnsknqvslklssvtaadtavyycakhyyy |
| | | ggsyamdywgqgtlvtvsstttpaprpptpaptiasqplslrpeacrpaaggavhtrgldfacdi |
| | | yiwaplagtcgvlllslvitlyckrgrkkllyifkqpfmrpvqttqeedgcscrfpeeeeggcelrv |
| | | kfsrsadapaykqgqnqlynelnlgrreeydvldkrrgrdpemggkprrknpqeglynelqkd |
| | | kmaeayseigmkgerrrgkghdglyqglstatkdtydalhmqalppr |

CAR 6

| | | |
|---|---|---|
| CAR6 | 6 | eivmtqspatlslspgeratlscrasqdiskylnwyqqkpgqaprlliyhtsrlhsgiparfsgsgs |
| scFv | | gtdytltisslqpedfavyfcqqgntlpytfgqgtkleikggggsggggsggggsggggsqvqlq |
| domain | | esgpglvkpsetlsltctvsgvslpdygvswirqppgkglewigviwgsettyyqsslksrvtisk |
| | | dnsknqvslklssvtaadtavyycakhyyyggsyamdywgqgtlvtvss |
| 99790 | 66 | atggccctcccagtgaccgctctgctgctgcctctcgcacttcttctccatgccgctcggcctgagat |
| CAR6- | | cgtcatgacccaaagccccgctaccctgtccctgtcacccggcgagagggcaaccctttcatgcag |
| Soluble | | ggccagccaggacatttctaagtacctcaactggtatcagcagaagccagggcaggctcctcgcct |
| scFv-nt | | gctgatctaccacaccagccgcctccacagcggtatccccgccagattttccgggagcgggtctgg |
| | | aaccgactacaccctcaccatctcttctctgcagcccgaggatttcgccgtctatttctgccagcagg |
| | | ggaatactctgccgtacaccttcggtcaaggtaccaagctggaaatcaagggaggcggaggatca |
| | | ggcggtggcggaagcggaggaggtggctccggaggaggaggttcccaagtgcagcttcaagaa |
| | | tcaggacccggacttgtgaagccatcagaaaccctctccctgacttgtaccgtgtccggtgtgagcc |
| | | tccccgactacggagtctcttggattcgccagcctccggggaagggtcttgaatggattggggtgat |
| | | ttggggatcagagactacttactaccagtcatcacttaagtcacgggtcaccatcagcaaagataata |
| | | gcaagaaccaagtgtcacttaagctgtcatctgtgaccgccgctgacaccgccgtgtactattgtgc |
| | | caaacattactattacggagggtcttatgctatggactactggggacaggggaccctggtgactgtct |
| | | ctagccatcaccatcaccaccatcatcac |
| 99790 | 78 | MALPVTALLLPLALLLHAARPeivmtqspatlslspgeratlscrasqdiskyl |
| CAR6- | | nwyqqkpgqaprlliyhtsrlhsgiparfsgsgsgtdytltisslqpedfavyfcqqgntlpytfgq |
| Soluble | | gtkleikggggsggggsggggsggggsqvqlqesgpglvkpsetlsltctvsgvslpdygvswi |
| scFv-aa | | rqppgkglewigviwgsettyyqsslksrvtiskdnsknqvslklssvtaadtavyycakhyyy |
| | | ggsyamdywgqgtlvtvsshhhhhhhh |
| 104880 | 90 | atggccctccctgtcaccgccctgctgcttccgctggctcttctgctccacgccgctcggcccgaaa |
| CAR6- | | ttgtgatgacccagtcacccgccactcttagcctttcacccggtgagcgcgcaaccctgtcttgcag |
| Full-nt | | agcctcccaagacatctcaaaataccttaattggtatcaacagaagcccggacaggctcctcgcctt |
| | | ctgatctaccacaccagccggctccattctggaatccctgccaggttcagcggtagcggatctggg |
| | | accgactacaccctcactatcagctcactgcagccagaggacttcgctgtctatttctgtcagcaagg |
| | | gaacaccctgccctacacctttggacagggcaccaagctcgagattaaaggtggaggtggcagcg |
| | | gaggaggtgggtccggcggtggaggaagcggaggcggagggagccaggtccaactccaaga |
| | | aagcggaccgggtcttgtgaagccatcagaaactctttcactgacttgtactgtgagcggagtgtctc |
| | | tccccgattacggggtgtcttggatcagacagccaccggggaagggtctggaatggattggagtg |
| | | atttggggctctgagactacttactaccaatcatccctcaagtcacgcgtcaccatctcaaaggacaa |
| | | ctctaagaatcaggtgtcactgaaactgtcatctgtgaccgcagccgacaccgccgtgtactattgc |
| | | gctaagcattactattatggcgggagctacgcaatggattactggggacagggtactctggtcaccg |
| | | tgtccagcaccactaccccagcaccgaggccacccaccccggctcctaccatcgcctcccagcct |
| | | ctgtccctgcgtccggaggcatgtagacccgcagctggtggggccgtgcatacccggggtcttga |
| | | cttcgcctgcgatatctacatttgggcccctctggctggtacttgcggggtcctgctgctttcactcgtg |
| | | atcactctttactgtaagcgcggtcggaagaagctgctgtacatctttaagcaacccttcatgaggcct |
| | | gtgcagactactcaagaggaggacggctgttcatgccggttcccagaggaggaggaaggcggct |
| | | gcgaactgcgcgtgaaattcagccgcagcgcagatgctccagcctacaagcaggggcagaacca |
| | | gctctacaacgaactcaatcttggtcggagagaggagtacgacgtgctggacaagcggagagga |
| | | cgggacccagaaatgggcgggaagccgcgcagaaagaatccccaagagggcctgtacaacga |
| | | gctccaaaaggataagatggcagaagcctatagcgagattggtatgaaaggggaacgcagaaga |
| | | ggcaaaggccacgacggactgtaccagggactcagcaccgccaccaaggacacctatgacgct |
| | | cttcacatgcaggccctgccgcctcgg |
| 104880 | 36 | MALPVTALLLPLALLLHAARPeivmtqspatlslspgeratlscrasqdiskyln |
| CAR6- | | wyqqkpgqaprlliyhtsrlhsgiparfsgsgsgtdytltisslqpedfavyfcqqgntlpytfgq |
| Full-aa | | gtkleikggggsggggsggggsggggsqvqlqesgpglvkpsetlsltctvsgvslpdygvswi |
| | | rqppgkglewigviwgsettyygsslksrvtiskdnsknqvslklssvtaadtavyycakhyyy |
| | | ggsyamdywgqgtlvtvsstttpaprpptpaptiasqplslrpeacrpaaggavhtrgldfacdi |
| | | yiwaplagtcgvlllslvitlyckrgrkkllyifkqpfmrpvqttqeedgcscrfpeeeeggcelrv |
| | | kfsrsadapaykqgqnqlynelnlgrreeydvldkrrgrdpemggkprrknpqeglynelqkd |
| | | kmaeayseigmkgerrrgkghdglyqglstatkdtydalhmqalppr |

CAR 7

| | | |
|---|---|---|
| CAR7 | 7 | qvqlqesgpglvkpsetlsltctvsgvslpdygvswirqppgkglewigviwgsettyyssslks |
| scFv | | rvtiskdnsknqvslklssvtaadtavyycakhyyyggsyamdywgqgtlvtvssggggsgg |
| domain | | ggsggggsggggseivmtqspatlslspgeratlscrasqdiskylnwyqqkpgqaprlliyhts |
| | | rlhsgiparfsgsgsgtdytltisslqpedfavyfcqqgntlpytfgqgtkleik |
| 100796 | 67 | atggcactgcctgtcactgccctcctgctgcctctggccctccttctgcatgccgccaggccccaag |
| CAR7- | | tccagctgcaagagtcaggacccggactggtgaagccgtctgagactctctcactgacttgtaccgt |
| Soluble | | cagcggcgtgtccctccccgactacggagtgtcatggatccgccaacctcccgggaaagggcttg |
| scFv-nt | | aatggattggtgtcatctggggttctgaaaccacctactactcatcttccctgaagtccagggtgacc |
| | | atcagcaaggataattccaagaaccaggtcagccttaagctgtcatctgtgaccgctgctgacaccg |
| | | ccgtgtattactgcgccaagcactactattacggaggaagctacgctatggactattggggacagg |
| | | gcactctcgtgactgtgagcagcggcggtggagggtctggaggtggaggatccggtggtggtgg |
| | | gtcaggcggaggagggagcgagattgtgatgactcagtcaccagccaccctttctctttcacccgg |
| | | cgagagagcaaccctgagctgtagagccagccaggacatttctaagtacctcaactggtatcagca |
| | | aaaaccggggcaggcccctcgcctcctgatctaccatacctcacgccttcactctggtatccccgct |
| | | cggtttagcggatcaggatctggtaccgactacactctgaccatttccagcctgcagccagaagattt |
| | | cgcagtgtatttctgccagcagggcaatacccttccttacaccttcggtcagggaaccaagctcgaa |
| | | atcaagcaccatcaccatcatcaccaccat |
| 100796 | 79 | MALPVTALLLPLALLLHAARPqvqlqesgpglvkpsetlsltctvsgvslpdy |
| CAR7- | | gvswirqppgkglewigviwgsettyyssslksrvtiskdnsknqvslklssvtaadtavyycak |
| Soluble | | hyyyggsyamdywgqgtlvtvssggggsggggsggggsggggseivmtqspatlslspger |
| scFv-aa | | atlscrasqdiskylnwyqqkpgqaprlliyhtsrlhsgiparfsgsgsgtdytltisslqpedfavy |
| | | fcqqgntlpytfgqgtkleikhhhhhhhh |
| 104881 | 91 | atggctctgcccgtgaccgcactcctcctgccactggctctgctgcttcacgccgctcgcccacaag |
| CAR 7 | | tccagcttcaagaatcagggcctggtctggtgaagccatctgagactctgtccctcacttgcaccgtg |
| Full-nt | | agcggagtgtccctcccagactacggagtgagctggattagacagcctcccggaaagggactgg |
| | | agtggatcggagtgatttggggtagcgaaaccacttactattcatcttccctgaagtcacgggtcacc |
| | | atttcaaaggataactcaaagaatcaagtgagcctcaagctctcatcagtcaccgccgctgacaccg |
| | | ccgtgtattactgtgccaagcattactactatggagggtcctacgccatggactactggggccaggg |
| | | aactctggtcactgtgtcatctggtggaggaggtagcggaggaggcgggagcggtggaggtggc |
| | | tccggaggtggcggaagcgaaatcgtgatgacccagagccctgcaaccctgtccctttctcccgg |
| | | ggaacgggctaccctttcttgtcgggcatcacaagatatctcaaaatacctcaattggtatcaacaga |
| | | agccgggacaggcccctaggcttcttatctaccacacctctcgcctgcatagcgggattcccgcac |
| | | gctttagcgggtctggaagcgggaccgactacactctgaccatctcatctctccagcccgaggactt |
| | | cgccgtctacttctgccagcagggtaacaccctgccgtacaccttcggccagggcaccaagcttga |
| | | gatcaaaaccactactcccgctccaaggccacccacccctgccccgaccatcgcctctcagccgct |
| | | ttccctgcgtccggaggcatgtagacccgcagctggtggggccgtgcatacccggggtcttgactt |
| | | cgcctgcgatatctacatttgggcccctctggctggtacttgcggggtcctgctgctttcactcgtgat |
| | | cactctttactgtaagcgcggtcggaagaagctgctgtacatctttaagcaacccttcatgaggcctg |
| | | tgcagactactcaagaggaggacggctgttcatgccggttcccagaggaggaggaaggcggctg |
| | | cgaactgcgcgtgaaattcagccgcagcgcagatgctccagcctacaagcaggggcagaaccag |
| | | ctctacaacgaactcaatcttggtcggagagaggagtacgacgtgctggacaagcggagaggac |
| | | gggacccagaaatgggcgggaagccgcgcagaaagaatccccaagagggcctgtacaacgag |
| | | ctccaaaaggataagatggcagaagcctatagcgagattggtatgaaaggggaacgcagaagag |
| | | gcaaaggccacgacggactgtaccagggactcagcaccgccaccaaggacacctatgacgctct |
| | | tcacatgcaggccctgccgcctcgg |
| 104881 | 37 | MALPVTALLLPLALLLHAARPqvqlqesgpglvkpsetlsltctvsgvslpdygv |
| CAR 7 | | swirqppgkglewigviwgsettyyssslksrvtiskdnsknqvslklssvtaadtavyycakh |
| Full-aa | | yyyggsyamdywgqgtlvtvssggggsggggsggggsggggseivmtqspatlslspgera |
| | | tlscrasqdiskylnwyqqkpgqaprlliyhtsrlhsgiparfsgsgsgtdytltisslqpedfav |
| | | yfcqqgntlpytfgqgtkleiktttpaprpptpaptiasqplslrpeacrpaaggavhtrgldfacd |
| | | iyiwaplagtcgvlllslvitlyckrgrkkllyifkqpfmrpvqttqeedgcscrfpeeeeggcelr |
| | | vkfsrsadapaykqgqnqlynelnlgrreeydvldkrrgrdpemggkprrknpqeglynelqk |
| | | dkmaeayseigmkgerrrgkghdglyqglstatkdtydalhmqalppr |

CAR 8

| | | |
|---|---|---|
| CAR8 | 8 | qvqlqesgpglvkpsetlsltctvsgvslpdygvswirqppgkglewigviwgsettyyqsslks |
| scFv | | rvtiskdnsknqvslklssvtaadtavyycakhyyyggsyamdywgqgtlvtvssggggsgg |
| domain | | ggsggggsggggseivmtqspatlslspgeratlscrasqdiskylnwyqqkpgqaprlliyhts |
| | | rlhsgiparfsgsgsgtdytltisslqpedfavyfcqqgntlpytfgqgtkleik |
| 100798 | 68 | atggcactgcctgtcactgccctcctgctgcctctggccctccttctgcatgccgccaggccccaag |
| CAR8- | | tccagctgcaagagtcaggacccggactggtgaagccgtctgagactctctcactgacttgtaccgt |
| Soluble | | cagcggcgtgtccctccccgactacggagtgtcatggatccgccaacctcccgggaaagggcttg |
| scFv-nt | | aatggattggtgtcatctggggttctgaaaccacctactaccagtcttccctgaagtccagggtgacc |
| | | atcagcaaggataattccaagaaccaggtcagccttaagctgtcatctgtgaccgctgctgacaccg |
| | | ccgtgtattactgcgccaagcactactattacggaggaagctacgctatggactattggggacagg |
| | | gcactctcgtgactgtgagcagcggcggtggagggtctggaggtggaggatccggtggtggtgg |
| | | gtcaggcggaggagggagcgagattgtgatgactcagtcaccagccaccctttctctttcacccgg |
| | | cgagagagcaaccctgagctgtagagccagccaggacatttctaagtacctcaactggtatcagca |
| | | aaaaccggggcaggcccctcgcctcctgatctaccatacctcacgccttcactctggtatccccgct |
| | | cggtttagcggatcaggatctggtaccgactacactctgaccatttccagcctgcagccagaagattt |
| | | cgcagtgtatttctgccagcagggcaatacccttccttacaccttcggtcagggaaccaagctcgaa |
| | | atcaagcaccatcaccatcatcatcaccac |
| 100798 | 80 | MALPVTALLLPLALLLHAARPqvqlqesgpglvkpsetlsltctvsgvslpdy |
| CAR8- | | gvswirqppgkglewigviwgsettyyqsslksrvtiskdnsknqvslklssvtaadtavyyca |
| Soluble | | khyyyggsyamdywgqgtlvtvssggggsggggsggggsggggseivmtqspatlslspge |
| scFv-aa | | ratlscrasqdiskylnwyqqkpgqaprlliyhtsrlhsgiparfsgsgsgtdytltisslqpedfav |
| | | yfcqqgntlpytfgqgtkleikhhhhhhhh |
| 104882 | 92 | atggctctgcccgtgaccgcactcctcctgccactggctctgctgcttcacgccgctcgcccacaag |
| CAR 8- | | tccagcttcaagaatcagggcctggtctggtgaagccatctgagactctgtccctcacttgcaccgtg |
| Full-nt | | agcggagtgtccctcccagactacggagtgagctggattagacagcctcccggaaagggactgg |
| | | agtggatcggagtgatttggggtagcgaaaccacttactatcaatcttccctgaagtcacgggtcac |
| | | catttcaaaggataactcaaagaatcaagtgagcctcaagctctcatcagtcaccgccgctgacacc |
| | | gccgtgtattactgtgccaagcattactactatggagggtcctacgccatggactactggggccagg |
| | | gaactctggtcactgtgtcatctggtggaggaggtagcggaggaggcgggagcggtggaggtgg |
| | | ctccggaggcggtgggtcagaaatcgtgatgacccagagccctgcaaccctgtccctttctcccgg |
| | | ggaacgggctaccctttcttgtcgggcatcacaagatatctcaaaatacctcaattggtatcaacaga |
| | | agccgggacaggcccctaggcttcttatctaccacacctctcgcctgcatagcgggattcccgcac |
| | | gctttagcgggtctggaagcgggaccgactacactctgaccatctcatctctccagcccgaggactt |
| | | cgccgtctacttctgccagcagggtaacaccctgccgtacaccttcggccagggcaccaagcttga |
| | | gatcaaaaccactactcccgctccaaggccacccacccctgccccgaccatcgcctctcagccgct |
| | | ttccctgcgtccggaggcatgtagacccgcagctggtggggccgtgcatacccggggtcttgactt |
| | | cgcctgcgatatctacatttgggcccctctggctggtacttgcggggtcctgctgctttcactcgtgat |
| | | cactctttactgtaagcgcggtcggaagaagctgctgtacatctttaagcaacccttcatgaggcctg |
| | | tgcagactactcaagaggaggacggctgttcatgccggttcccagaggaggaggaaggcggctg |
| | | cgaactgcgcgtgaaattcagccgcagcgcagatgctccagcctacaagcaggggcagaaccag |
| | | ctctacaacgaactcaatcttggtcggagagaggagtacgacgtgctggacaagcggagaggac |
| | | gggacccagaaatgggcgggaagccgcgcagaaagaatccccaagagggcctgtacaacgag |
| | | ctccaaaaggataagatggcagaagcctatagcgagattggtatgaaaggggaacgcagaagag |
| | | gcaaaggccacgacggactgtaccagggactcagcaccgccaccaaggacacctatgacgctct |
| | | tcacatgcaggccctgccgcctcgg |
| 104882 | 38 | MALPVTALLLPLALLLHAARPqvqlqesgpglvkpsetlsltctvsgvslpdygv |
| CAR 8- | | swirqppgkglewigviwgsettyyqsslksrvtiskdnsknqvslklssvtaadtavyycakh |
| Full-aa | | yyyggsyamdywgqgtlvtvssggggsggggsggggsggggseivmtqspatlslspgera |
| | | tlscrasqdiskylnwyqqkpgqaprlliyhtsrlhsgiparfsgsgsgtdytltisslqpedfav |
| | | yfcqqgntlpytfgqgtkleiktttpaprpptpaptiasqplslrpeacrpaaggavhtrgldfacd |
| | | iyiwaplagtcgvlllslvitlyckrgrkkllyifkqpfmrpvqttqeedgcscrfpeeeeggcelr |
| | | vkfsrsadapaykqgqnqlynelnlgrreeydvldkrrgrdpemggkprrknpqeglynelqk |
| | | dkmaeayseigmkgerrrgkghdglyqglstatkdtydalhmqalppr |

CAR 9

| | | |
|---|---|---|
| CAR9 | 9 | eivmtqspatlslspgeratlscrasqdiskylnwyqqkpgqaprlliyhtsrlhsgiparfsgsgs |
| scFv | | gtdytltisslqpedfavyfcqqgntlpytfgqgtkleikggggsggggsggggsggggsqvqlq |
| domain | | esgpglvkpsetlsltctvsgvslpdygvswirqppgkglewigviwgsettyynsslksrvtisk |
| | | dnsknqvslklssvtaadtavyycakhyyyggsyamdywgqgtlvtvss |
| 99789 | 69 | atggccctcccagtgaccgctctgctgctgcctctcgcacttcttctccatgccgctcggcctgagat |
| CAR9- | | cgtcatgacccaaagccccgctaccctgtccctgtcacccggcgagagggcaaccctttcatgcag |
| Soluble | | ggccagccaggacatttctaagtacctcaactggtatcagcagaagccagggcaggctcctcgcct |
| scFv-nt | | gctgatctaccacaccagccgcctccacagcggtatccccgccagattttccgggagcgggtctgg |
| | | aaccgactacaccctcaccatctcttctctgcagcccgaggatttcgccgtctatttctgccagcagg |
| | | ggaatactctgccgtacaccttcggtcaaggtaccaagctggaaatcaagggaggcggaggatca |
| | | ggcggtggcggaagcggaggaggtggctccggaggaggaggttcccaagtgcagcttcaagaa |
| | | tcaggacccggacttgtgaagccatcagaaaccctctccctgacttgtaccgtgtccggtgtgagcc |
| | | tccccgactacggagtctcttggattcgccagcctccggggaagggtcttgaatggattggggtgat |
| | | ttggggatcagagactacttactacaattcatcacttaagtcacgggtcaccatcagcaaagataata |
| | | gcaagaaccaagtgtcacttaagctgtcatctgtgaccgccgctgacaccgccgtgtactattgtgc |
| | | caaacattactattacggagggtcttatgctatggactactggggacaggggaccctggtgactgtct |
| | | ctagccatcaccatcaccaccatcatcac |
| 99789 | 81 | MALPVTALLLPLALLLHAARPeivmtqspatlslspgeratlscrasqdiskyl |
| CAR9- | | nwyqqkpgqaprlliyhtsrlhsgiparfsgsgsgtdytltisslqpedfavyfcqqgntlpytfgq |
| Soluble | | gtkleikggggsggggsggggsggggsqvqlqesgpglvkpsetlsltctvsgvslpdygvswi |
| scFv-aa | | rqppgkglewigviwgsettyynsslksrvtiskdnsknqvslklssvtaadtavyycakhyyy |
| | | ggsyamdywgqgtivtvsshhhhhhhh |
| 105974 | 93 | atggccctccctgtcaccgccctgctgcttccgctggctcttctgctccacgccgctcggcccgaaa |
| CAR 9- | | ttgtgatgacccagtcacccgccactcttagcctttcacccggtgagcgcgcaaccctgtcttgcag |
| Full-nt | | agcctcccaagacatctcaaaataccttaattggtatcaacagaagcccggacaggctcctcgcctt |
| | | ctgatctaccacaccagccggctccattctggaatccctgccaggttcagcggtagcggatctggg |
| | | accgactacaccctcactatcagctcactgcagccagaggacttcgctgtctatttctgtcagcaagg |
| | | gaacaccctgccctacacctttggacagggcaccaagctcgagattaaaggtggaggtggcagcg |
| | | gaggaggtgggtccggcggtggaggaagcggaggcggtgggagccaggtccaactccaagaa |
| | | agcggaccgggtcttgtgaagccatcagaaactctttcactgacttgtactgtgagcggagtgtctct |
| | | ccccgattacggggtgtcttggatcagacagccaccggggaagggtctggaatggattggagtga |
| | | tttggggctctgagactacttactacaactcatccctcaagtcacgcgtcaccatctcaaaggacaac |
| | | tctaagaatcaggtgtcactgaaactgtcatctgtgaccgcagccgacaccgccgtgtactattgcg |
| | | ctaagcattactattatggcgggagctacgcaatggattactggggacagggtactctggtcaccgt |
| | | gtccagcaccactaccccagcaccgaggccacccaccccggctcctaccatcgcctcccagcctc |
| | | tgtccctgcgtccggaggcatgtagacccgcagctggtggggccgtgcatacccggggtcttgact |
| | | tcgcctgcgatatctacatttgggcccctctggctggtacttgcggggtcctgctgctttcactcgtgat |
| | | cactctttactgtaagcgcggtcggaagaagctgctgtacatctttaagcaacccttcatgaggcctg |
| | | tgcagactactcaagaggaggacggctgttcatgccggttcccagaggaggaggaaggcggctg |
| | | cgaactgcgcgtgaaattcagccgcagcgcagatgctccagcctacaagcaggggcagaaccag |
| | | ctctacaacgaactcaatcttggtcggagagaggagtacgacgtgctggacaagcggagaggac |
| | | gggacccagaaatgggcgggaagccgcgcagaaagaatccccaagagggcctgtacaacgag |
| | | ctccaaaaggataagatggcagaagcctatagcgagattggtatgaaaggggaacgcagaagag |
| | | gcaaaggccacgacggactgtaccagggactcagcaccgccaccaaggacacctatgacgctct |
| | | tcacatgcaggccctgccgcctcgg |
| 105974 | 39 | MALPVTALLLPLALLLHAARPeivmtqspatlslspgeratlscrasadiskyln |
| CAR 9- | | wyqqkpgqaprlliyhtsrlhsgiparfsgsgsgtdvtltisslqpedfavyfcqqgntlpytfgq |
| Full-aa | | gtkleikggggsggggsggggsggggsqvqlqesgpglvkpsetlsltctvsgvslpdygvswi |
| | | rqppgkglewigviwgsettyynsslksrvtiskdnsknqvslklssvtaadtavyycakhyyy |
| | | ggsyamdywgqgtlvtvsstttpaprpptpaptiasqplslrpeacrpaaggavhtrgldfacdi |
| | | yiwaplagtcgvlllslvitlyckrgrkkllyifkqpfmrpvqttqeedgcscrfpeeeeggcelrv |
| | | kfsrsadapaykqgqnqlynelnlgrreeydvldkrrgrdpemggkprrknpqeglynelqkd |
| | | kmaeayseigmkgerrrgkghdglyqglstatkdtydalhmqalppr |

CAR10

| | | |
|---|---|---|
| CAR10 | 10 | qvqlqesgpglvkpsetlsltctvsgvslpdygvswirqppgkglewigviwgsettyynsslks |
| scFv | | rvtiskdnsknqvslklssvtaadtavyycakhyyyggsyamdywgqgtlvtvssggggsgg |
| domain | | ggsggggsggggseivmtqspatlslspgeratlscrasqdiskylnwyqqkpgqaprlliyhts |
| | | rlhsgiparfsgsgsgtdytltisslqpedfavyfcqqgntlpytfgqgtkleik |
| 100796 | 70 | atggcactgcctgtcactgccctcctgctgcctctggccctccttctgcatgccgccaggccccaag |
| CAR10- | | tccagctgcaagagtcaggacccggactggtgaagccgtctgagactctctcactgacttgtaccgt |
| Soluble | | cagcggcgtgtccctccccgactacggagtgtcatggatccgccaacctcccgggaaagggcttg |
| scFv-nt | | aatggattggtgtcatctggggttctgaaaccacctactacaactcttccctgaagtccagggtgacc |
| | | atcagcaaggataattccaagaaccaggtcagccttaagctgtcatctgtgaccgctgctgacaccg |
| | | ccgtgtattactgcgccaagcactactattacggaggaagctacgctatggactattggggacagg |
| | | gcactctcgtgactgtgagcagcggcggtggagggtctggaggtggaggatccggtggtggtgg |
| | | gtcaggcggaggagggagcgagattgtgatgactcagtcaccagccaccctttctctttcacccgg |
| | | cgagagagcaaccctgagctgtagagccagccaggacatttctaagtacctcaactggtatcagca |
| | | aaaaccggggcaggcccctcgcctcctgatctaccatacctcacgccttcactctggtatccccgct |
| | | cggtttagcggatcaggatctggtaccgactacactctgaccatttccagcctgcagccagaagattt |
| | | cgcagtgtatttctgccagcagggcaatacccttccttacaccttcggtcagggaaccaagctcgaa |
| | | atcaagcaccatcaccatcatcaccaccat |
| 100796 | 82 | MALPVTALLLPLALLLHAARPqvqlqesgpglvkpsetlsltctvsgvslpdy |
| CAR10- | | gvswirqppgkglewigviwgsettyynsslksrvtiskdnsknqvslklssvtaadtavyyca |
| Soluble | | khyyyggsyamdywgqgtlvtvssggggsggggsggggsggggseivmtqspatlslspge |
| scFv-aa | | ratlscrasqdiskylnwyqqkpgqaprlliyhtsrlhsgiparfsgsgsgtdytltisslqpedfav |
| | | yfcqqgntlpytfgqgtkleikhhhhhhhh |
| 105975 | 94 | atggccctccctgtcaccgccctgctgcttccgctggctcttctgctccacgccgctcggcccgaaa |
| CAR 10- | | ttgtgatgacccagtcacccgccactcttagcctttcacccggtgagcgcgcaaccctgtcttgcag |
| Full-nt | | agcctcccaagacatctcaaaataccttaattggtatcaacagaagcccggacaggctcctcgcctt |
| | | ctgatctaccacaccagccggctccattctggaatccctgccaggttcagcggtagcggatctggg |
| | | accgactacaccctcactatcagctcactgcagccagaggacttcgctgtctatttctgtcagcaagg |
| | | gaacaccctgccctacacctttggacagggcaccaagctcgagattaaaggtggaggtggcagcg |
| | | gaggaggtgggtccggcggtggaggaagcggaggcggtgggagccaggtccaactccaagaa |
| | | agcggaccgggtcttgtgaagccatcagaaactctttcactgacttgtactgtgagcggagtgtctct |
| | | ccccgattacggggtgtcttggatcagacagccaccggggaagggtctggaatggattggagtga |
| | | tttggggctctgagactacttactacaactcatccctcaagtcacgcgtcaccatctcaaaggacaac |
| | | tctaagaatcaggtgtcactgaaactgtcatctgtgaccgcagccgacaccgccgtgtactattgcg |
| | | ctaagcattactattatggcgggagctacgcaatggattactggggacagggtactctggtcaccgt |
| | | gtccagcaccactaccccagcaccgaggccacccaccccggctcctaccatcgcctcccagcctc |
| | | tgtccctgcgtccggaggcatgtagacccgcagctggtggggccgtgcatacccggggtcttgact |
| | | tcgcctgcgatatctacatttgggcccctctggctggtacttgcggggtcctgctgctttcactcgtgat |
| | | cactctttactgtaagcgcggtcggaagaagctgctgtacatctttaagcaacccttcatgaggcctg |
| | | tgcagactactcaagaggaggacggctgttcatgccggttcccagaggaggaggaaggcggctg |
| | | cgaactgcgcgtgaaattcagccgcagcgcagatgctccagcctacaagcaggggcagaaccag |
| | | ctctacaacgaactcaatcttggtcggagagaggagtacgacgtgctggacaagcggagaggac |
| | | gggacccagaaatgggcgggaagccgcgcagaaagaatccccaagagggcctgtacaacgag |
| | | ctccaaaaggataagatggcagaagcctatagcgagattggtatgaaaggggaacgcagaagag |
| | | gcaaaggccacgacggactgtaccagggactcagcaccgccaccaaggacacctatgacgctct |
| | | tcacatgcaggccctgccgcctcgg |
| 105975 | 40 | MALPVTALLLPLALLLHAARPEIVMTQSPATLSLSPGERATLSC |
| CAR 10 | | RASQDISKYLNWYQQKPGQAPRLLIYHTSRLHSGIPARFSGSG |
| Full-aa | | SGTDYTLTISSLQPEDFAVYFCQQGNTLPYTFGQGTKLEIKGG |
| | | GGSGGGGSGGGGSGGGGSQVQLQESGPGLVKPSETLSLTCTVS |
| | | GVSLPDYGVSWIRQPPGKGLEWIGVIWGSETTYYNSSLKSRV |
| | | TISKDNSKNQVSLKLSSVTAADTAVYYCAKHYYYGGSYAMD |
| | | YWGQGTLVTVSSTTTPAPRPPTPAPTIASQPLSLRPEACRPAAG |
| | | GAVHTRGLDFACDIYIWAPLAGTCGVLLLSLVITLYCKRGRKK |
| | | LLYIFKQPFMRPVQTTQEEDGCSCRFPEEEEGGCELRVKFSRSA |
| | | DAPAYKQGQNQLYNELNLGRREEYDVLDKRRGRDPEMGGKP |
| | | RRKNPQEGLYNELQKDKMAEAYSEIGMKGERRRGKGHDGLY |
| | | QGLSTATKDTYDALHMQALPPR |

CAR11

| | | |
|---|---|---|
| CAR11 | 11 | eivmtqspatlslspgeratlscrasqdiskylnwyqqkpgqaprlliyhtsrlhsgiparfsgsgs |
| scFv | | gtdytltisslqpedfavyfcqqgntlpytfgqgtkleikggggsggggsggggsqvqlqesgpg |
| domain | | lvkpsetlsltctvsgvslpdygvswirqppgkglewigviwgsettyynsslksrvtiskdnskn |
| | | qvslklssvtaadtavyycakhyyyggsyamdywgqgtlvtvss |
| 103101 | 71 | Atggccctccctgtcaccgccctgctgcttccgctggctcttctgctccacgccgctcggcccgaa |
| CAR11- | | attgtgatgacccagtcacccgccactcttagcctttcacccggtgagcgcgcaaccctgtcttgca |
| Soluble | | gagcctcccaagacatctcaaaataccttaattggtatcaacagaagcccggacaggctcctcgcct |
| scFv-nt | | tctgatctaccacaccagccggctccattctggaatccctgccaggttcagcggtagcggatctggg |
| | | accgactacaccctcactatcagctcactgcagccagaggacttcgctgtctatttctgtcagcaagg |
| | | gaacaccctgccctacacctttggacagggcaccaagctcgagattaaaggtggaggtggcagcg |
| | | gaggaggtgggtccggcggtggaggaagccaggtccaactccaagaaagcggaccgggtcttg |
| | | tgaagccatcagaaactctttcactgacttgtactgtgagcggagtgtctctccccgattacggggtgt |
| | | cttggatcagacagccaccggggaagggtctggaatggattggagtgatttggggctctgagacta |
| | | cttactacaattcatccctcaagtcacgcgtcaccatctcaaaggacaactctaagaatcaggtgtca |
| | | ctgaaactgtcatctgtgaccgcagccgacaccgccgtgtactattgcgctaagcattactattatgg |
| | | cgggagctacgcaatggattactggggacagggtactctggtcaccgtgtccagccaccaccatc |
| | | atcaccatcaccat |
| 103101 | 83 | MALPVTALLLPLALLLHAARPeivmtqspatlslspgeratlscrasqdiskyl |
| CAR11- | | nwyqqkpgqaprlliyhtsrlhsgiparfsgsgsgtdytltisslqpedfavyfcqqgntlpytfgq |
| Soluble | | gtkleikggggsggggsggggsqvqlqesgpglvkpsetlsltctvsgvslpdygvswirqppg |
| scFv-aa | | kglewigviwgsettyynsslksrvtiskdnsknqvslklssvtaadtavyycakhyyyggsya |
| | | mdywgqgtlvtvsshhhhhhhh |
| 105976 | 95 | atggctctgcccgtgaccgcactcctcctgccactggctctgctgcttcacgccgctcgcccacaag |
| CAR 11 | | tccagcttcaagaatcagggcctggtctggtgaagccatctgagactctgtccctcacttgcaccgtg |
| Full-nt | | agcggagtgtccctcccagactacggagtgagctggattagacagcctcccggaaagggactgg |
| | | agtggatcggagtgatttggggtagcgaaaccacttactataactcttccctgaagtcacgggtcac |
| | | catttcaaaggataactcaaagaatcaagtgagcctcaagctctcatcagtcaccgccgctgacacc |
| | | gccgtgtattactgtgccaagcattactactatggagggtcctacgccatggactactggggccagg |
| | | gaactctggtcactgtgtcatctggtggaggaggtagcggaggaggcgggagcggtggaggtgg |
| | | ctccggaggtggcggaagcgaaatcgtgatgacccagagccctgcaaccctgtccctttctcccg |
| | | gggaacgggctaccctttcttgtcgggcatcacaagatatctcaaaatacctcaattggtatcaacag |
| | | aagccgggacaggcccctaggcttcttatctaccacacctctcgcctgcatagcgggattcccgca |
| | | cgctttagcgggtctggaagcgggaccgactacactctgaccatctcatctctccagcccgaggac |
| | | ttcgccgtctacttctgccagcagggtaacaccctgccgtacaccttcggccagggcaccaagcttg |
| | | agatcaaaaccactactcccgctccaaggccacccacccctgccccgaccatcgcctctcagccg |
| | | ctttccctgcgtccggaggcatgtagacccgcagctggtggggccgtgcatacccggggtcttgac |
| | | ttcgcctgcgatatctacatttgggcccctctggctggtacttgcggggtcctgctgctttcactcgtga |
| | | tcactctttactgtaagcgcggtcggaagaagctgctgtacatctttaagcaacccttcatgaggcct |
| | | gtgcagactactcaagaggaggacggctgttcatgccggttcccagaggaggaggaaggcggct |
| | | gcgaactgcgcgtgaaattcagccgcagcgcagatgctccagcctacaagcaggggcagaacca |
| | | gctctacaacgaactcaatcttggtcggagagaggagtacgacgtgctggacaagcggagagga |
| | | cgggacccagaaatgggcgggaagccgcgcagaaagaatccccaagagggcctgtacaacga |
| | | gctccaaaaggataagatggcagaagcctatagcgagattggtatgaaaggggaacgcagaaga |
| | | ggcaaaggccacgacggactgtaccagggactcagcaccgccaccaaggacacctatgacgct |
| | | cttcacatgcaggccctgccgcctcgg |
| 105976 | 41 | MALPVTALLLPLALLLHAARPQVQLQESGPGLVKPSETLSLTC |
| CAR 11 | | TVSGVSLPDYGVSWIRQPPGKGLEWIGVIWGSETTYYNSSLK |
| Full-aa | | SRVTISKDNSKNQVSLKLSSVTAADTAVYYCAKHYYYGGSYA |
| | | MDYWGQGTLVTVSSGGGGSGGGGSGGGGSGGGGSEIVMTQS |
| | | PATLSLSPGERATLSCRASQDISKYLNWYQQKPGQAPRLLIYH |
| | | TSRLHSGIPARFSGSGSGTDYTLTISSLQPEDFAVYFCQQGNTL |
| | | PYTFGQGTKLEIKTTTPAPRPPTPAPTIASQPLSLRPEACRPAAG |
| | | GAVHTRGLDFACDIYIWAPLAGTCGVLLLSLVITLYCKRGRKK |
| | | LLYIFKQPFMRPVQTTQEEDGCSCRFPEEEEGGCELRVKFSRSA |
| | | DAPAYKQGQNQLYNELNLGRREEYDVLDKRRGRDPEMGGKP |
| | | RRKNPQEGLYNELQKDKMAEAYSEIGMKGERRRGKGHDGLY |
| | | QGLSTATKDTYDALHMQALPPR |

CAR12

| | | |
|---|---|---|
| CAR12 | 12 | qvqlqesgpglvkpsetlsltctvsgvslpdygvswirqppgkglewigviwgsettyynsslks |
| scFv | | rvtiskdnsknqvslklssvtaadtavyycakhyyyggsyamdywgqgtlvtvssggggsgg |
| domain | | ggsggggseivmtqspatlslspgeratlscrasqdiskylnwyqqkpgqaprlliyhtsrlhsgi |
| | | parfsgsgsgtdytltisslqpedfavyfcqqgntlpytfgqgtkleik |
| 103104 | 72 | atggctctgcccgtgaccgcactcctcctgccactggctctgctgcttcacgccgctcgcccacaag |
| CAR12- | | tccagcttcaagaatcagggcctggtctggtgaagccatctgagactctgtccctcacttgcaccgtg |
| Soluble | | agcggagtgtccctcccagactacggagtgagctggattagacagcctcccggaaagggactgg |
| scFv-nt | | agtggatcggagtgatttggggtagcgaaaccacttactataactcttccctgaagtcacgggtcac |
| | | catttcaaaggataactcaaagaatcaagtgagcctcaagctctcatcagtcaccgccgctgacacc |
| | | gccgtgtattactgtgccaagcattactactatggagggtcctacgccatggactactggggccagg |
| | | gaactctggtcactgtgtcatctggtggaggaggtagcggaggaggcgggagcggtggaggtgg |
| | | ctccgaaatcgtgatgacccagagccctgcaaccctgtccctttctcccggggaacgggctaccctt |
| | | tcttgtcgggcatcacaagatatctcaaaatacctcaattggtatcaacagaagccgggacaggccc |
| | | ctaggcttcttatctaccacacctctcgcctgcatagcgggattcccgcacgctttagcgggtctgga |
| | | agcgggaccgactacactctgaccatctcatctctccagcccgaggacttcgccgtctacttctgcc |
| | | agcagggtaacaccctgccgtacaccttcggccagggcaccaagcttgagatcaaacatcaccac |
| | | catcatcaccatcac |
| 103104 | 84 | MALPVTALLLPLALLLHAARPqvqlqesgpglvkpsetlsltctvsgvslpdy |
| CAR12- | | gvswirqppgkglewigviwgsettyynsslksrvtiskdnsknqvslklssvtaadtavyyca |
| Soluble | | khyyyggsyamdywgqgtlvtvssggggsggggsggggseivmtqspatlslspgeratlscr |
| scFv-aa | | asqdiskylnwyqqkpgqaprlliyhtsrlhsgiparfsgsgsgtdytltisslqpedfavyfcqqg |
| | | ntlpytfgqgtkleikhhhhhhhh |
| 105977 | 96 | atggccctccctgtcaccgccctgctgcttccgctggctcttctgctccacgccgctcggcccgaaa |
| CAR 12- | | ttgtgatgacccagtcacccgccactcttagcctttcacccggtgagcgcgcaaccctgtcttgcag |
| Full-nt | | agcctcccaagacatctcaaaataccttaattggtatcaacagaagcccggacaggctcctcgcctt |
| | | ctgatctaccacaccagccggctccattctggaatccctgccaggttcagcggtagcggatctggg |
| | | accgactacaccctcactatcagctcactgcagccagaggacttcgctgtctatttctgtcagcaagg |
| | | gaacaccctgccctacacctttggacagggcaccaagctcgagattaaaggtggaggtggcagcg |
| | | gaggaggtgggtccggcggtggaggaagccaggtccaactccaagaaagcggaccgggtcttg |
| | | tgaagccatcagaaactctttcactgacttgtactgtgagcggagtgtctctccccgattacggggtgt |
| | | cttggatcagacagccaccggggaagggtctggaatggattggagtgatttggggctctgagacta |
| | | cttactacaactcatccctcaagtcacgcgtcaccatctcaaaggacaactctaagaatcaggtgtca |
| | | ctgaaactgtcatctgtgaccgcagccgacaccgccgtgtactattgcgctaagcattactattatgg |
| | | cgggagctacgcaatggattactggggacagggtactctggtcaccgtgtccagcaccactaccc |
| | | cagcaccgaggccacccaccccggctcctaccatcgcctcccagcctctgtccctgcgtccggag |
| | | gcatgtagacccgcagctggtggggccgtgcatacccggggtcttgacttcgcctgcgatatctac |
| | | atttgggcccctctggctggtacttgcggggtcctgctgctttcactcgtgatcactctttactgtaagc |
| | | gcggtcggaagaagctgctgtacatctttaagcaacccttcatgaggcctgtgcagactactcaaga |
| | | ggaggacggctgttcatgccggttcccagaggaggaggaaggcggctgcgaactgcgcgtgaa |
| | | attcagccgcagcgcagatgctccagcctacaagcaggggcagaaccagctctacaacgaactc |
| | | aatcttggtcggagagaggagtacgacgtgctggacaagcggagaggacgggacccagaaatg |
| | | ggcgggaagccgcgcagaaagaatccccaagagggcctgtacaacgagctccaaaaggataag |
| | | atggcagaagcctatagcgagattggtatgaaaggggaacgcagaagaggcaaaggccacgac |
| | | ggactgtaccagggactcagcaccgccaccaaggacacctatgacgctcttcacatgcaggccct |
| | | gccgcctcgg |
| 105977 | 42 | MALPVTALLLPLALLLHAARPEIVMTQSPATLSLSPGERATLSC |
| CAR 12- | | RASQDISKYLNWYQQKPGQAPRLLIYHTSRLHSGIPARFSGSG |
| Full-aa | | SGTDYTLTISSLQPEDFAVYFCQQGNTLPYTFGQGTKLEIKGG |
| | | GGSGGGGSGGGGSQVQLQESGPGLVKPSETLSLTCTVSGVSLP |
| | | DYGVSWIRQPPGKGLEWIGVIWGSETTYYNSSLKSRVTISKD |
| | | NSKNQVSLKLSSVTAADTAVYYCAKHYYYGGSYAMDYWGQ |
| | | GTLVTVSSTTTPAPRPPTPAPTIASQPLSLRPEACRPAAGGAVH |
| | | TRGLDFACDIYIWAPLAGTCGVLLLSLVITLYCKRGRKKLLYIF |
| | | KQPFMRPVQTTQEEDGCSCRFPEEEEGGCELRVKFSRSADAPA |
| | | YKQGQNQLYNELNLGRREEYDVLDKRRGRDPEMGGKPRRKN |
| | | PQEGLYNELQKDKMAEAYSEIGMKGERRRGKGHDGLYQGLS |
| | | TATKDTYDALHMQALPPR |

TABLE 3
Murine CD19 CAR Constructs
CTL019

| | | |
|---|---|---|
| CTL019- | 97 | Atggccctgcccgtcaccgctctgctgctgccccttgctctgcttcttcatgcagcaaggccggaca |
| Soluble | | tccagatgacccaaaccacctcatccctctctgcctctcttggagacagggtgaccatttcttgtcgc |
| scFv- | | gccagccaggacatcagcaagtatctgaactggtatcagcagaagccggacggaaccgtgaagc |
| Histag-nt | | tcctgatctaccatacctctcgcctgcatagcggcgtgccctcacgcttctctggaagcggatcagg |
| | | aaccgattattctctcactatttcaaatcttgagcaggaagatattgccacctatttctgccagcagggt |
| | | aataccctgccctacaccttcggaggagggaccaagctcgaaatcaccggtggaggaggcagcg |
| | | gcggtggagggtctggtggaggtggttctgaggtgaagctgcaagaatcaggccctggacttgtg |
| | | gccccttcacagtccctgagcgtgacttgcaccgtgtccggagtctccctgcccgactacggagtgt |
| | | catggatcagacaacctccacggaaaggactggaatggctcggtgtcatctggggtagcgaaact |
| | | acttactacaattcagccctcaaaagcaggctgactattatcaaggacaacagcaagtcccaagtctt |
| | | tcttaagatgaactcactccagactgacgacaccgcaatctactattgtgctaagcactactactacg |
| | | gaggatcctacgctatggattactggggacaaggtacttccgtcactgtctcttcacaccatcatcac |
| | | catcaccatcac |
| CTL019- | 98 | MALPVTALLLPLALLLHAARPdiqmtqttsslsaslgdrvtiscrasqdiskyl |
| Soluble | | nwyqqkpdgtvklliyhtsrlhsgvpsrfsgsgsgtdysltisnleqediatyfcqqgntlpytfgg |
| scFv- | | gtkleitggggsggggsggggsevklqesgpglvapsqslsvtctvsgvslpdygvswirqppr |
| Histag-aa | | kglewlgviwgsettyynsalksrltiikdnsksqvflkmnslqtddtaiyycakhyyyggsya |
| | | mdywgqgtsvtvsshhhhhhhh |
| CTL019 | 99 | atggccttaccagtgaccgccttgctcctgccgctggccttgctgctccacgccgccaggccggac |
| Full-nt | | atccagatgacacagactacatcctccctgtctgcctctctgggagacagagtcaccatcagttgca |
| | | gggcaagtcaggacattagtaaatatttaaattggtatcagcagaaaccagatggaactgttaaactc |
| | | ctgatctaccatacatcaagattacactcaggagtcccatcaaggttcagtggcagtgggtctggaa |
| | | cagattattctctcaccattagcaacctggagcaagaagatattgccacttacttttgccaacagggta |
| | | atacgcttccgtacacgttcggaggggggaccaagctggagatcacaggtggcggtggctcggg |
| | | cggtggtgggtcgggtggcggcggatctgaggtgaaactgcaggagtcaggacctggcctggtg |
| | | gcgccctcacagagcctgtccgtcacatgcactgtctcaggggtctcattacccgactatggtgtaa |
| | | gctggattcgccagcctccacgaaagggtctggagtggctgggagtaatatggggtagtgaaacc |
| | | acatactataattcagctctcaaatccagactgaccatcatcaaggacaactccaagagccaagtttt |
| | | cttaaaaatgaacagtctgcaaactgatgacacagccatttactactgtgccaaacattattactacgg |
| | | tggtagctatgctatggactactggggccaaggaacctcagtcaccgtctcctcaaccacgacgcc |
| | | agcgccgcgaccaccaacaccggcgcccaccatcgcgtcgcagcccctgtccctgcgcccaga |
| | | ggcgtgccggccagcggcggggggcgcagtgcacacgagggggctggacttcgcctgtgatat |
| | | ctacatctgggcgcccttggccgggacttgtggggtccttctcctgtcactggttatcaccctttactg |
| | | caaacggggcagaaagaaactcctgtatatattcaaacaaccatttatgagaccagtacaaactact |
| | | caagaggaagatggctgtagctgccgatttccagaagaagaagaaggaggatgtgaactgagagt |
| | | gaagttcagcaggagcgcagacgcccccgcgtacaagcagggccagaaccagctctataacga |
| | | gctcaatctaggacgaagagaggagtacgatgttttggacaagagacgtggccgggaccctgaga |
| | | tggggggaaagccgagaaggaagaaccctcaggaaggcctgtacaatgaactgcagaaagata |
| | | agatggcggaggcctacagtgagattgggatgaaaggcgagcgccggaggggcaaggggcac |
| | | gatggcctttaccagggtctcagtacagccaccaaggacacctacgacgcccttcacatgcaggcc |
| | | ctgccccctcgc |
| CTL019 | 58 | MALPVTALLLPLALLLHAARPdiqmtqttsslsaslgdrvtiscrasqdiskylnw |
| Full-aa | | yqqkpdgtvklliyhtsrlhsgvpsrfsgsgsgtdysltisnleqediatyfcqqgntlpytfgggtk |
| | | leitggggsggggsggggsevklqesgpglvapsqslsvtctvsgvslpdygvswirqpprkgl |
| | | ewlgviwgsettyynsalksrltiikdnsksqvflkmnslqtddtaiyycakhyyyggsyamd |
| | | ywgqgtsvtvsstttpaprpptpaptiasqplslrpeacrpaaggavhtrgldfacdiyiwaplagt |
| | | cgvlllslvitlyckrgrkkllyifkqpfmrpvqttqeedgcscrfpeeeeggcelrvkfsrsadap |
| | | aykqgqnqlynelnlgrreeydvldkrrgrdpemggkprrknpqeglynelqkdkmaeayse |
| | | igmkgerrrgkghdglyqglstatkdtydalhmqalppr |
| CTL019 | 59 | Diqmtqttsslsaslgdrvtiscrasqdiskylnwyqqkpdgtvklliyhtsrlhsgvpsrfsgsgs |
| scFv | | gtdysltisnleqediatyfcqqgntlpytfgggtkleitggggsggggsggggsevklqesgpgl |
| domain | | vapsqslsvtctvsgvslpdygvswirqpprkglewlgviwgsettyynsalksrltiikdnsksq |
| | | vflkmnslqtddtaiyycakhyyyggsyamdywgqgtsvtvss |
| mCAR1 | 109 | QVQLLESGAELVRPGSSVKISCKASGYAFSSYWMNWVKQRPG |
| scFv | | QGLEWIGQIYPGDGDTNYNGKFKGQATLTADKSSSTAYMQLS |
| | | GLTSEDSAVYSCARKTISSVVDFYFDYWGQGTTVTGGGSGGG |
| | | SGGGSGGGSELVLTQSPKFMSTSVGDRVSVTCKASQNVGTNV |
| | | AWYQQKPGQSPKPLIYSATYRNSGVPDRFTGSGSGTDFTLTIT |
| | | NVQSKDLADYFCQYNRYPYTSFFFTKLEIKRRS |
| mCAR1 | 110 | QVQLLESGAELVRPGSSVKISCKASGYAFSSYWMNWVKQRPG |
| Full-aa | | QGLEWIGQIYPGDGDTNYNGKFKGQATLTADKSSSTAYMQLS |
| | | GLTSEDSAVYSCARKTISSVVDFYFDYWGQGTTVTGGGSGGG |
| | | SGGGSGGGSELVLTQSPKFMSTSVGDRVSVTCKASQNVGTNV |
| | | AWYQQKPGQSPKPLIYSATYRNSGVPDRFTGSGSGTDFTLTIT |
| | | NVQSKDLADYFCQYNRYPYTSFFFTKLEIKRRSKIEVMYPPPYL |
| | | DNEKSNGTIIHVKGKHLCPSPLFPGPSKPFWVLVVVGGVLACY |
| | | SLLVTVAFIIFWVRSKRSRLLHSDYMNMTPRRPGPTRKHYQPY |
| | | APPRDFAAYRSRVKFSRSADAPAYQQGQNQLYNELNLGRREE |
| | | YDVLDKRRGRDPEMGGKPRRKNPQEGLYNELQKDKMAEAYS |
| | | EIGMKGERRRGKGHDGLYQGLSTATKDTYDALHMQALPPR |
| mCAR2 | 111 | DIQMTQTTSSLSASLGDRVTISCRASQDISKYLNWYQQKPDGT |
| scFv | | VKLLIYHTSRLHSGVPSRFSGSGSGTDYSLTISNLEQEDIATYFC |
| | | QQGNTLPYTFGGGTKLEITGSTSGSGKPGSGEGSTKGEVKLQE |
| | | SGPGLVAPSQSLSVTCTVSGVSLPDYGVSWIRQPPRKGLEWLG |
| | | VIWGSETTYYNSALKSRLTIIKDNSKSQVFLKMNSLQTDDTAIY |
| | | YCAKHYYYGGSYAMDYWGQGTSVTVSSE |
| mCAR2 | 112 | DIQMTQTTSSLSASLGDRVTISCRASQDISKYLNWYQQKPDGT |
| CAR-aa | | VKLLIYHTSRLHSGVPSRFSGSGSGTDYSLTISNLEQEDIATYFC |
| | | QQGNTLPYTFGGGTKLEITGSTSGSGKPGSGEGSTKGEVKLQE |
| | | SGPGLVAPSQSLSVTCTVSGVSLPDYGVSWIRQPPRKGLEWLG |
| | | VIWGSETTYYNSALKSRLTIIKDNSKSQVFLKMNSLQTDDTAIY |
| | | YCAKHYYYGGSYAMDYWGQGTSVTVSSESKYGPPCPPCPMF |
| | | WVLVVVGGVLACYSLLVTVAFIIFWVKRGRKKLLYIFKQPFM |
| | | RPVQTTQEEDGCSCRFEEEEGGCELRVKFSRSADAPAYQQGQ |
| | | NQLYNELNLGRREEYDVLDKRRGRDPEMGGKPRRKNPQEGL |
| | | YNELQKDKMAEAYSEIGMKGERRRGKGHDGLYQGLSTATKD |
| | | TYDALHMQALPPRL |
| mCAR2 | 113 | DIQMTQTT SSLSASLGDR VTISCRASQD ISKYLNWYQQ |
| Full-aa | | KPDGTVKLLI YHTSRLHSGV PSRFSGSGSG TDYSLTISNL |
| | | EQEDIATYFC QQGNTLPYTF GGGTKLEITG STSGSGKPGS |
| | | GEGSTKGEVK LQESGPGLVA PSQSLSVTCT VSGVSLPDYG |
| | | VSWIRQPPRK GLEWLGVIWG SETTYYNSAL KSRLTIIKDN |
| | | SKSQVFLKMN SLQTDDTAIY YCAKHYYYGG |
| | | SYAMDYWGQG TSVTVSSESK YGPPCPPCPM FWVLVVVGGV |
| | | LACYSLLVTV |
| | | AFIIFWVKRG RKKLLYIFKQ PFMRPVQTTQ EEDGCSCRFE |
| | | EEEGGCELRV KFSRSADAPA YQQGQNQLYN ELNLGRREEY |
| | | DVLDKRRGRD PEMGGKPRRK NPQEGLYNEL QKDKMAEAYS |
| | | EIGMKGERRR GKGHDGLYQG LSTATKDTYD ALHMQALPPR |
| | | LEGGGEGRGS LLTCGDVEEN PGPRMLLLVT SLLLCELPHP |
| | | AFLLIPRKVC NGIGIGEFKD SLSINATNIK HFKNCTSISG |
| | | DLHILPVAFR GDSFTHTPPL DPQELDILKT VKEITGFLLI |
| | | QAWPENRTDL HAFENLEIIR |
| | | GRTKQHGQFS LAVVSLNITS LGLRSLKEIS DGDVIISGNK |
| | | NLCYANTINW KKLFGTSGQK TKIISNRGEN SCKATGQVCH |
| | | ALCSPEGCWG PEPRDCVSCR NVSRGRECVD KCNLLEGEPR |
| | | EFVENSECIQ CHPECLPQAM NITCTGRGPD NCIQCAHYID |
| | | GPHCVKTCPA GVMGENNTLV WKYADAGHVC |
| | | HLCHPNCTYG CTGPGLEGCP TNGPKIPSIA TGMVGALLLL |
| | | LVVALGIGLF M |
| mCAR3 | 114 | DIQMTQTTSSLSASLGDRVTISCRASQDISKYLNWYQQKPDGT |
| scFv | | VKLLIYHTSRLHSGVPSRFSGSGSGTDYSLTISNLEQEDIATYFC |
| | | QQGNTLPYTFGGGTKLEITGSTSGSGKPGSGEGSTKGEVKLQE |
| | | SGPGLVAPSQSLSVTCTVSGVSLPDYGVSWIRQPPRKGLEWLG |
| | | VIWGSETTYYNSALKSRLTIIKDNSKSQVFLKMNSLQTDDTAIY |
| | | YCAKHYYYGGSYAMDYWGQGTSVTVSS |
| mCAR3 | 115 | DIQMTQTTSSLSASLGDRVTISCRASQDISKYLNWYQQKPDGT |
| Full-aa | | VKLLIYHTSRLHSGVPSRFSGSGSGTDYSLTISNLEQEDIATYFC |
| | | QQGNTLPYTFGGGTKLEITGSTSGSGKPGSGEGSTKGEVKLQE |
| | | SGPGLVAPSQSLSVTCTVSGVSLPDYGVSWIRQPPRKGLEWLG |
| | | VIWGSETTYYNSALKSRLTIIKDNSKSQVFLKMNSLQTDDTAIY |
| | | YCAKHYYYGGSYAMDYWGQGTSVTVSSAAAIEVMYPPPYLD |
| | | NEKSNGTIIHVKGKHLCPSPLFPGPSKPFWVLVVVGGVLACYS |
| | | LLVTVAFIIFWVRSKRSRLLHSDYMNMTPRRPGPTRKHYQPYA |
| | | PPRDFAAYRSRVKFSRSADAPAYQQGQNQLYNELNLGRREEY |
| | | DVLDKRRGRDPEMGGKPRRKNPQEGLYNELQKDKMAEAYSE |
| | | IGMKGERRRGKGHDGLYQGLSTATKDTYDALHMQALPPR |
| SSJ25-C1 | | QVQLLESGAELVRPGSSVKISCKASGYAFSSYWMNWVKQRPG |
| VH | | QGLEWIGQIYPGDGDTNYNGKFKGQATLTADKSSSTAYMQLS |
| sequence | | GLTSEDSAVYSCARKTISSVVDFYFDYWGQGTTVT |
| SSJ25-C1 | | ELVLTQSPKFMSTSVGDRVSVTCKASQNVGTNVAWYQQKPG |
| VL | | QSPKPLIYSATYRNSGVPDRFTGSGSGTDFTLTITNVQSKDLAD |
| sequence | | YFYFCQYNRYPYTSGGGTKLEIKRRS |

TABLE 4
Heavy Chain Variable Domain CDRs

| Candidate | FW | HCDR1 | ID | HCDR2 | ID | HCDR3 | ID |
|---|---|---|---|---|---|---|---|
| murine_CART19 | | GVSLPDYGVS | 19 | VIWGSETTYYNSALKS | 20 | HYYYGGSYAMDY | 24 |
| humanized_CART19 a | VH4 | GVSLPDYGVS | 19 | VIWGSETTYYSSSLKS | 21 | HYYYGGSYAMDY | 24 |
| humanized_CART19 b | VH4 | GVSLPDYGVS | 19 | VIWGSETTYYQSSLKS | 22 | HYYYGGSYAMDY | 24 |
| humanized_CART19 c | VH4 | GVSLPDYGVS | 19 | VIWGSETTYYNSSLKS | 23 | HYYYGGSYAMDY | 24 |

TABLE 5
Light Chain Variable Domain CDRs

| Candidate | FW | LCDR1 | ID | LCDR2 | ID | LCDR3 | ID |
|---|---|---|---|---|---|---|---|
| murine_CART19 | | RASQDISKYLN | 25 | HTSRLHS | 26 | QQGNTLPYT | 27 |
| humanized_CART19 a | VK3 | RASQDISKYLN | 25 | HTSRLHS | 26 | QQGNTLPYT | 27 |
| humanized_CART19 b | VK3 | RASQDISKYLN | 25 | HTSRLHS | 26 | QQGNTLPYT | 27 |
| humanized_CART19 c | VK3 | RASQDISKYLN | 25 | HTSRLHS | 26 | QQGNTLPYT | 27 |

[0313] Provided herein are CD19 inhibitors and combination therapies. In some embodiments, the CD19 inhibitor (e.g., a cell therapy, e.g., a CD19-expressing CAR, or an antibody) is administered in combination with a B cell inhibitor, e.g., one or more inhibitors of CD10, CD19, CD20, CD22, CD34, CD123, FLT-3, or ROR1. A CD19 inhibitor includes but is not limited to a CD19 CAR-expressing cell, e.g., a CD19 CART cell, or an anti-CD19 antibody (e.g., an anti-CD19 mono- or bispecific antibody) or a fragment or conjugate thereof. In an embodiment, the CD19 inhibitor is administered in combination with a B-cell inhibitor, e.g., a CAR-expressing cell described herein.

[0314] In some other embodiments, the CD19 inhibitor is administered in combination with a B-cell inhibitor, and their use in medicaments or methods for treating, among other diseases, cancer or any malignancy or autoimmune diseases involving cells or tissues which express CD19.

[0315] Numerous CD19 CAR-expressing cells are described in this disclosure. For instance, in some embodiments, a CD19 inhibitor includes an anti-CD19 CAR-expressing cell, e.g., CART, e.g., a cell expressing an anti-CD19 CAR construct described in Table 2, e.g., CTL119, or encoded by a CD19 binding CAR comprising a scFv, CDRs, or VH and VL chains described in Tables 2, 4, or 5. For example, an anti-CD19 CAR-expressing cell, e.g., CART, is a generated by engineering a CD19-CAR (that comprises a CD19 binding domain) into a cell (e.g., a T cell or NK cell), e.g., for administration in combination with a CAR-expressing cell described herein. Also provided herein are methods of use of the CAR-expressing cells described herein for adoptive therapy.

### BCMA Binding Domains and CARs

[0316] In embodiments the BCMA CAR comprises an anti-BCMA binding domain (e.g., human or humanized anti-BCMA binding domain), a transmembrane domain, and an intracellular signaling domain, and wherein said anti-BCMA binding domain comprises a heavy chain complementary determining region 1 (HC CDR1), a heavy chain complementary determining region 2 (HC CDR2), and a heavy chain complementary determining region 3 (HC CDR3) of any anti-BMCA heavy chain binding domain amino acid sequences listed in Table 4D or 4E.

[0317] In one embodiment, the anti-BCMA binding domain comprises a light chain variable region described herein (e.g., in Table 4D or 4E) and/or a heavy chain variable region described herein (e.g., in Table 4D or 4E).

[0318] In one embodiment, the encoded anti-BCMA binding domain is a scFv comprising a light chain and a heavy chain of an amino acid sequence of Table 4D or 4E.

[0319] In an embodiment, the human or humanized anti-BCMA binding domain (e.g., an scFv) comprises: a light chain variable region comprising an amino acid sequence having at least one, two or three modifications (e.g., substitutions, e.g., conservative substitutions) but not more than 30, 20 or 10 modifications (e.g., substitutions, e.g., conservative substitutions) of an amino acid sequence of a light chain variable region provided in Table 4D or 4E, or a sequence with at least 95% (e.g., 95-99%) identity thereof; and/or a heavy chain variable region comprising an amino acid sequence having at least one, two or three modifications (e.g., substitutions, e.g., conservative substitutions) but not more than 30, 20 or 10 modifications (e.g., substitutions, e.g., conservative substitutions) of an amino acid sequence of a heavy chain variable region provided in Table 4D or 4E, or a sequence with at least 95% (e.g., 95-99%) identity thereof.

TABLE 4D
Amino Acid and Nucleic Acid Sequences of exemplary
anti-BCMA scFv domains and BCMA CAR molecules

| | | |
|---|---|---|
| | SEQ | |
| Name/ | ID | |
| Description | NO: | Sequence |

139109

| | | |
|---|---|---|
| 139109-aa | 1400 | EVQLVESGGGLVQPGGSLRLSCAVSGFALSNHGMSWVRRAPGK |
| ScFv | | GLEWVSGIVYSGSTYYAASVKGRFTISRDNSRNTLYLQMNSLRP |
| domain | | EDTAIYYCSAHGGESDVWGQGTTVTVSSASGGGGSGGRASGGG |
| | | GSDIQLTQSPSSLSASVGDRVTITCRASQSISSYLNWYQQKPGKA |
| | | PKLLIYAASSLQSGVPSRFSGSGSGTDFTLTISSLQPEDFATYYCQ |
| | | QSYSTPYTFGQGTKVEIK |
| 139109-nt | 1401 | GAAGTGCAATTGGTGGAATCAGGGGGAGGACTTGTGCAGCCT |
| ScFv | | GGAGGATCGCTGAGACTGTCATGTGCCGTGTCCGGCTTTGCCC |
| domain | | TGTCCAACCACGGGATGTCCTGGGTCCGCCGCGCGCCTGGAA |
| | | AGGGCCTCGAATGGGTGTCGGGTATTGTGTACAGCGGTAGCA |
| | | CCTACTATGCCGCATCCGTGAAGGGGAGATTCACCATCAGCC |
| | | GGGACAACTCCAGGAACACTCTGTACCTCCAAATGAATTCGC |
| | | TGAGGCCAGAGGACACTGCCATCTACTACTGCTCCGCGCATG |
| | | GCGGAGAGTCCGACGTCTGGGGACAGGGGACCACCGTGACC |
| | | GTGTCTAGCGCGTCCGGCGGAGGCGGCAGCGGGGGTCGGGCA |
| | | TCAGGGGGCGGCGGATCGGACATCCAGCTCACCCAGTCCCCG |
| | | AGCTCGCTGTCCGCCTCCGTGGGAGATCGGGTCACCATCACG |
| | | TGCCGCGCCAGCCAGTCGATTTCCTCCTACCTGAACTGGTACC |
| | | AACAGAAGCCCGGAAAAGCCCCGAAGCTTCTCATCTACGCCG |
| | | CCTCGAGCCTGCAGTCAGGAGTGCCCTCACGGTTCTCCGGCTC |
| | | CGGTTCCGGTACTGATTTCACCCTGACCATTTCCTCCCTGCAA |
| | | CCGGAGGACTTCGCTACTTACTACTGCCAGCAGTCGTACTCCA |
| | | CCCCCTACACTTTCGGACAAGGCACCAAGGTCGAAATCAAG |
| 139109-aa | 1402 | EVQLVESGGGLVQPGGSLRLSCAVSGFALSNHGMSWVRRAPGK |
| VH | | GLEWVSGIVYSGSTYYAASVKGRFTISRDNSRNTLYLQMNSLRP |
| | | EDTAIYYCSAHGGESDVWGQGTTVTVSS |
| 139109-aa | 1403 | DIQLTQSPSSLSASVGDRVTITCRASQSISSYLNWYQQKPGKAPK |
| VL | | LLIYAASSLQSGVPSRFSGSGSGTDFTLTISSLQPEDFATYYCQQS |
| | | YSTPYTFGQGTKVEIK |
| 139109-aa | 1404 | MALPVTALLLPLALLLHAARPEVQLVESGGGLVQPGGSLRLSCA |
| Full CAR | | VSGFALSNHGMSWVRRAPGKGLEWVSGIVYSGSTYYAASVKGR |
| | | FTISRDNSRNTLYLQMNSLRPEDTAIYYCSAHGGESDVWGQGTT |
| | | VTVSSASGGGGSGGRASGGGGSDIQLTQSPSSLSASVGDRVTITC |
| | | RASQSISSYLNWYQQKPGKAPKLLIYAASSLQSGVPSRFSGSGSG |
| | | TDFTLTISSLQPEDFATYYCQQSYSTPYTFGQGTKVEIKTTTPAPR |
| | | PPTPAPTIASQPLSLRPEACRPAAGGAVHTRGLDFACDIYIWAPL |
| | | AGTCGVLLLSLVITLYCKRGRKKLLYIFKQPFMRPVQTTQEEDG |
| | | CSCRFPEEEEGGCELRVKFSRSADAPAYKQGQNQLYNELNLGRR |
| | | EEYDVLDKRRGRDPEMGGKPRRKNPQEGLYNELQKDKMAEAY |
| | | SEIGMKGERRRGKGHDGLYQGLSTATKDTYDALHMQALPPR |
| 139109-nt | 1405 | ATGGCCCTCCCTGTCACCGCCCTGCTGCTTCCGCTGGCTCTTC |
| Full CAR | | TGCTCCACGCCGCTCGGCCCGAAGTGCAATTGGTGGAATCAG |
| | | GGGGAGGACTTGTGCAGCCTGGAGGATCGCTGAGACTGTCAT |
| | | GTGCCGTGTCCGGCTTTGCCCTGTCCAACCACGGGATGTCCTG |
| | | GGTCCGCCGCGCGCCTGGAAAGGGCCTCGAATGGGTGTCGGG |
| | | TATTGTGTACAGCGGTAGCACCTACTATGCCGCATCCGTGAA |
| | | GGGGAGATTCACCATCAGCCGGGACAACTCCAGGAACACTCT |
| | | GTACCTCCAAATGAATTCGCTGAGGCCAGAGGACACTGCCAT |
| | | CTACTACTGCTCCGCGCATGGCGGAGAGTCCGACGTCTGGGG |
| | | ACAGGGGACCACCGTGACCGTGTCTAGCGCGTCCGGCGGAGG |
| | | CGGCAGCGGGGGTCGGGCATCAGGGGGCGGCGGATCGGACA |
| | | TCCAGCTCACCCAGTCCCCGAGCTCGCTGTCCGCCTCCGTGGG |
| | | AGATCGGGTCACCATCACGTGCCGCGCCAGCCAGTCGATTTC |
| | | CTCCTACCTGAACTGGTACCAACAGAAGCCCGGAAAAGCCCC |
| | | GAAGCTTCTCATCTACGCCGCCTCGAGCCTGCAGTCAGGAGT |
| | | GCCCTCACGGTTCTCCGGCTCCGGTTCCGGTACTGATTTCACC |
| | | CTGACCATTTCCTCCCTGCAACCGGAGGACTTCGCTACTTACT |
| | | ACTGCCAGCAGTCGTACTCCACCCCCTACACTTTCGGACAAG |
| | | GCACCAAGGTCGAAATCAAGACCACTACCCCAGCACCGAGGC |
| | | CACCCACCCCGGCTCCTACCATCGCCTCCCAGCCTCTGTCCCT |
| | | GCGTCCGGAGGCATGTAGACCCGCAGCTGGTGGGGCCGTGCA |
| | | TACCCGGGGTCTTGACTTCGCCTGCGATATCTACATTTGGGCC |
| | | CCTCTGGCTGGTACTTGCGGGGTCCTGCTGCTTTCACTCGTGA |
| | | TCACTCTTTACTGTAAGCGCGGTCGGAAGAAGCTGCTGTACAT |
| | | CTTTAAGCAACCCTTCATGAGGCCTGTGCAGACTACTCAAGA |
| | | GGAGGACGGCTGTTCATGCCGGTTCCCAGAGGAGGAGGAAG |
| | | GCGGCTGCGAACTGCGCGTGAAATTCAGCCGCAGCGCAGATG |
| | | CTCCAGCCTACAAGCAGGGGCAGAACCAGCTCTACAACGAAC |
| | | TCAATCTTGGTCGGAGAGAGGAGTACGACGTGCTGGACAAGC |
| | | GGAGAGGACGGGACCCAGAAATGGGCGGGAAGCCGCGCAGA |
| | | AAGAATCCCCAAGAGGGCCTGTACAACGAGCTCCAAAAGGAT |
| | | AAGATGGCAGAAGCCTATAGCGAGATTGGTATGAAAGGGGA |
| | | ACGCAGAAGAGGCAAAGGCCACGACGGACTGTACCAGGGAC |
| | | TCAGCACCGCCACCAAGGACACCTATGACGCTCTTCACATGC |
| | | AGGCCCTGCCGCCTCGG |

139103

| | | |
|---|---|---|
| 139103-aa | 1406 | QVQLVESGGGLVQPGRSLRLSCAASGFTFSNYAMSWVRQAPGK |
| ScFv | | GLGWVSGISRSGENTYYADSVKGRFTISRDNSKNTLYLQMNSLR |
| domain | | DEDTAVYYCARSPAHYYGGMDVWGQGTTVTVSSASGGGGSGG |
| | | RASGGGGSDIVLTQSPGTLSLSPGERATLSCRASQSISSSFLAWYQ |
| | | QKPGQAPRLLIYGASRRATGIPDRFSGSGSGTDFTLTISRLEPEDS |
| | | AVYYCQQYHSSPSWTFGQGTKLEIK |
| 139103-nt | 1407 | CAAGTGCAACTCGTGGAATCTGGTGGAGGACTCGTGCAACCC |
| ScFv | | GGAAGATCGCTTAGACTGTCGTGTGCCGCCAGCGGGTTCACT |
| domain | | TTCTCGAACTACGCGATGTCCTGGGTCCGCCAGGCACCCGGA |
| | | AAGGGACTCGGTTGGGTGTCCGGCATTTCCCGGTCCGGCGAA |
| | | AATACCTACTACGCCGACTCCGTGAAGGGCCGCTTCACCATCT |
| | | CAAGGGACAACAGCAAAAACACCCTGTACTTGCAAATGAACT |
| | | CCCTGCGGGATGAAGATACAGCCGTGTACTATTGCGCCCGGT |
| | | CGCCTGCCCATTACTACGGCGGAATGGACGTCTGGGGACAGG |
| | | GAACCACTGTGACTGTCAGCAGCGCGTCGGGTGGCGGCGGCT |
| | | CAGGGGGTCGGGCCTCCGGGGGGGGAGGGTCCGACATCGTGC |
| | | TGACCCAGTCCCCGGGAACCCTGAGCCTGAGCCCGGGAGAGC |
| | | GCGCGACCCTGTCATGCCGGGCATCCCAGAGCATTAGCTCCT |
| | | CCTTTCTCGCCTGGTATCAGCAGAAGCCCGGACAGGCCCCGA |
| | | GGCTGCTGATCTACGGCGCTAGCAGAAGGGCTACCGGAATCC |
| | | CAGACCGGTTCTCCGGCTCCGGTTCCGGGACCGATTTCACCCT |
| | | TACTATCTCGCGCCTGGAACCTGAGGACTCCGCCGTCTACTAC |
| | | TGCCAGCAGTACCACTCATCCCCGTCGTGGACGTTCGGACAG |
| | | GGCACCAAGCTGGAGATTAAG |
| 139103-aa | 1408 | QVQLVESGGGLVQPGRSLRLSCAASGFTFSNYAMSWVRQAPGK |
| VH | | GLGWVSGISRSGENTYYADSVKGRFTISRDNSKNTLYLQMNSLR |
| | | DEDTAVYYCARSPAHYYGGMDVWGQGTTVTVSS |
| 139103-aa | 1409 | DIVLTQSPGTLSLSPGERATLSCRASQSISSSFLAWYQQKPGQAPR |
| VL | | LLIYGASRRATGIPDRFSGSGSGTDFTLTISRLEPEDSAVYYCQQY |
| | | HSSPSWTFGQGTKLEIK |
| 139103-aa | 1410 | MALPVTALLLPLALLLHAARPQVQLVESGGGLVQPGRSLRLSCA |
| Full CAR | | ASGFTFSNYAMSWVRQAPGKGLGWVSGISRSGENTYYADSVKG |
| | | RFTISRDNSKNTLYLQMNSLRDEDTAVYYCARSPAHYYGGMDV |
| | | WGQGTTVTVSSASGGGGSGGRASGGGGSDIVLTQSPGTLSLSPG |
| | | ERATLSCRASQSISSSFLAWYQQKPGQAPRLLIYGASRRATGIPD |
| | | RFSGSGSGTDFTLTISRLEPEDSAVYYCQQYHSSPSWTFGQGTKL |
| | | EIKTTTPAPRPPTPAPTIASQPLSLRPEACRPAAGGAVHTRGLDFA |
| | | CDIYIWAPLAGTCGVLLLSLVITLYCKRGRKKLLYIFKQPFMRPV |
| | | QTTQEEDGCSCRFPEEEEGGCELRVKFSRSADAPAYKQGQNQLY |
| | | NELNLGRREEYDVLDKRRGRDPEMGGKPRRKNPQEGLYNELQK |
| | | DKMAEAYSEIGMKGERRRGKGHDGLYQGLSTATKDTYDALHM |
| | | QALPPR |
| 139103-nt | 1411 | ATGGCCCTCCCTGTCACCGCCCTGCTGCTTCCGCTGGCTCTTC |
| Full CAR | | TGCTCCACGCCGCTCGGCCCCAAGTGCAACTCGTGGAATCTG |
| | | GTGGAGGACTCGTGCAACCCGGAAGATCGCTTAGACTGTCGT |
| | | GTGCCGCCAGCGGGTTCACTTTCTCGAACTACGCGATGTCCTG |
| | | GGTCCGCCAGGCACCCGGAAAGGGACTCGGTTGGGTGTCCGG |
| | | CATTTCCCGGTCCGGCGAAAATACCTACTACGCCGACTCCGTG |
| | | AAGGGCCGCTTCACCATCTCAAGGGACAACAGCAAAAACACC |
| | | CTGTACTTGCAAATGAACTCCCTGCGGGATGAAGATACAGCC |
| | | GTGTACTATTGCGCCCGGTCGCCTGCCCATTACTACGGCGGAA |
| | | TGGACGTCTGGGGACAGGGAACCACTGTGACTGTCAGCAGCG |
| | | CGTCGGGTGGCGGCGGCTCAGGGGGTCGGGCCTCCGGGGGGG |
| | | GAGGGTCCGACATCGTGCTGACCCAGTCCCCGGGAACCCTGA |
| | | GCCTGAGCCCGGGAGAGCGCGCGACCCTGTCATGCCGGGCAT |
| | | CCCAGAGCATTAGCTCCTCCTTTCTCGCCTGGTATCAGCAGAA |
| | | GCCCGGACAGGCCCCGAGGCTGCTGATCTACGGCGCTAGCAG |
| | | AAGGGCTACCGGAATCCCAGACCGGTTCTCCGGCTCCGGTTC |
| | | CGGGACCGATTTCACCCTTACTATCTCGCGCCTGGAACCTGAG |
| | | GACTCCGCCGTCTACTACTGCCAGCAGTACCACTCATCCCCGT |
| | | CGTGGACGTTCGGACAGGGCACCAAGCTGGAGATTAAGACCA |
| | | CTACCCCAGCACCGAGGCCACCCACCCCGGCTCCTACCATCG |
| | | CCTCCCAGCCTCTGTCCCTGCGTCCGGAGGCATGTAGACCCGC |
| | | AGCTGGTGGGGCCGTGCATACCCGGGGTCTTGACTTCGCCTG |
| | | CGATATCTACATTTGGGCCCCTCTGGCTGGTACTTGCGGGGTC |
| | | CTGCTGCTTTCACTCGTGATCACTCTTTACTGTAAGCGCGGTC |
| | | GGAAGAAGCTGCTGTACATCTTTAAGCAACCCTTCATGAGGC |
| | | CTGTGCAGACTACTCAAGAGGAGGACGGCTGTTCATGCCGGT |
| | | TCCCAGAGGAGGAGGAAGGCGGCTGCGAACTGCGCGTGAAA |
| | | TTCAGCCGCAGCGCAGATGCTCCAGCCTACAAGCAGGGGCAG |
| | | AACCAGCTCTACAACGAACTCAATCTTGGTCGGAGAGAGGAG |
| | | TACGACGTGCTGGACAAGCGGAGAGGACGGGACCCAGAAAT |
| | | GGGCGGGAAGCCGCGCAGAAAGAATCCCCAAGAGGGCCTGT |
| | | ACAACGAGCTCCAAAAGGATAAGATGGCAGAAGCCTATAGC |
| | | GAGATTGGTATGAAAGGGGAACGCAGAAGAGGCAAAGGCCA |
| | | CGACGGACTGTACCAGGGACTCAGCACCGCCACCAAGGACAC |
| | | CTATGACGCTCTTCACATGCAGGCCCTGCCGCCTCGG |

139105

| | | |
|---|---|---|
| 139105-aa | 1412 | QVQLVESGGGLVQPGRSLRLSCAASGFTFDDYAMHWVRQAPG |
| ScFv | | KGLEWVSGISWNSGSIGYADSVKGRFTISRDNAKNSLYLQMNSL |
| domain | | RAEDTALYYCSVHSFLAYWGQGTLVTVSSASGGGGSGGRASGG |
| | | GGSDIVMTQTPLSLPVTPGEPASISCRSSQSLLHSNGYNYLDWYL |
| | | QKPGQSPQLLIYLGSNRASGVPDRFSGSGSGTDFTLKISRVEAED |
| | | VGVYYCMQALQTPYTFGQGTKVEIK |
| 139105-nt | 1413 | CAAGTGCAACTCGTCGAATCCGGTGGAGGTCTGGTCCAACCT |
| ScFv | | GGTAGAAGCCTGAGACTGTCGTGTGCGGCCAGCGGATTCACC |
| domain | | TTTGATGACTATGCTATGCACTGGGTGCGGCAGGCCCCAGGA |
| | | AAGGGCCTGGAATGGGTGTCGGGAATTAGCTGGAACTCCGGG |
| | | TCCATTGGCTACGCCGACTCCGTGAAGGGCCGCTTCACCATCT |
| | | CCCGCGACAACGCAAAGAACTCCCTGTACTTGCAAATGAACT |
| | | CGCTCAGGGCTGAGGATACCGCGCTGTACTACTGCTCCGTGC |
| | | ATTCCTTCCTGGCCTACTGGGGACAGGGAACTCTGGTCACCGT |
| | | GTCGAGCGCCTCCGGCGGCGGGGGCTCGGGTGGACGGGCCTC |
| | | GGGCGGAGGGGGGTCCGACATCGTGATGACCCAGACCCCGCT |
| | | GAGCTTGCCCGTGACTCCCGGAGAGCCTGCATCCATCTCCTGC |
| | | CGGTCATCCCAGTCCCTTCTCCACTCCAACGGATACAACTACC |
| | | TCGACTGGTACCTCCAGAAGCCGGGACAGAGCCCTCAGCTTC |
| | | TGATCTACCTGGGGTCAAATAGAGCCTCAGGAGTGCCGGATC |
| | | GGTTCAGCGGATCTGGTTCGGGAACTGATTTCACTCTGAAGAT |
| | | TTCCCGCGTGGAAGCCGAGGACGTGGGCGTCTACTACTGTAT |
| | | GCAGGCGCTGCAGACCCCCTATACCTTCGGCCAAGGGACGAA |
| | | AGTGGAGATCAAG |
| 139105-aa | 1414 | QVQLVESGGGLVQPGRSLRLSCAASGFTFDDYAMHWVRQAPG |
| VH | | KGLEWVSGISWNSGSIGYADSVKGRFTISRDNAKNSLYLQMNSL |
| | | RAEDTALYYCSVHSFLAYWGQGTLVTVSS |
| 139105-aa | 1415 | DIVMTQTPLSLPVTPGEPASISCRSSQSLLHSNGYNYLDWYLQKP |
| VL | | GQSPQLLIYLGSNRASGVPDRFSGSGSGTDFTLKISRVEAEDVGV |
| | | YYCMQALQTPYTFGQGTKVEIK |
| 139105-aa | 1416 | MALPVTALLLPLALLLHAARPQVQLVESGGGLVQPGRSLRLSCA |
| Full CAR | | ASGFTFDDYAMHWVRQAPGKGLEWVSGISWNSGSIGYADSVK |
| | | GRFTISRDNAKNSLYLQMNSLRAEDTALYYCSVHSFLAYWGQG |
| | | TLVTVSSASGGGGSGGRASGGGGSDIVMTQTPLSLPVTPGEPASI |
| | | SCRSSQSLLHSNGYNYLDWYLQKPGQSPQLLIYLGSNRASGVPD |
| | | RFSGSGSGTDFTLKISRVEAEDVGVYYCMQALQTPYTFGQGTKV |
| | | EIKTTTPAPRPPTPAPTIASQPLSLRPEACRPAAGGAVHTRGLDFA |
| | | CDIYIWAPLAGTCGVLLLSLVITLYCKRGRKKLLYIFKQPFMRPV |
| | | QTTQEEDGCSCRFPEEEEGGCELRVKFSRSADAPAYKQGQNQLY |
| | | NELNLGRREEYDVLDKRRGRDPEMGGKPRRKNPQEGLYNELQK |
| | | DKMAEAYSEIGMKGERRRGKGHDGLYQGLSTATKDTYDALHM |
| | | QALPPR |
| 139105-nt | 1417 | ATGGCCCTCCCTGTCACCGCCCTGCTGCTTCCGCTGGCTCTTC |
| Full CAR | | TGCTCCACGCCGCTCGGCCCCAAGTGCAACTCGTCGAATCCG |
| | | GTGGAGGTCTGGTCCAACCTGGTAGAAGCCTGAGACTGTCGT |
| | | GTGCGGCCAGCGGATTCACCTTTGATGACTATGCTATGCACTG |
| | | GGTGCGGCAGGCCCCAGGAAAGGGCCTGGAATGGGTGTCGG |
| | | GAATTAGCTGGAACTCCGGGTCCATTGGCTACGCCGACTCCG |
| | | TGAAGGGCCGCTTCACCATCTCCCGCGACAACGCAAAGAACT |
| | | CCCTGTACTTGCAAATGAACTCGCTCAGGGCTGAGGATACCG |
| | | CGCTGTACTACTGCTCCGTGCATTCCTTCCTGGCCTACTGGGG |
| | | ACAGGGAACTCTGGTCACCGTGTCGAGCGCCTCCGGCGGCGG |
| | | GGGCTCGGGTGGACGGGCCTCGGGCGGAGGGGGGTCCGACA |
| | | TCGTGATGACCCAGACCCCGCTGAGCTTGCCCGTGACTCCCG |
| | | GAGAGCCTGCATCCATCTCCTGCCGGTCATCCCAGTCCCTTCT |
| | | CCACTCCAACGGATACAACTACCTCGACTGGTACCTCCAGAA |
| | | GCCGGGACAGAGCCCTCAGCTTCTGATCTACCTGGGGTCAAA |
| | | TAGAGCCTCAGGAGTGCCGGATCGGTTCAGCGGATCTGGTTC |
| | | GGGAACTGATTTCACTCTGAAGATTTCCCGCGTGGAAGCCGA |
| | | GGACGTGGGCGTCTACTACTGTATGCAGGCGCTGCAGACCCC |
| | | CTATACCTTCGGCCAAGGGACGAAAGTGGAGATCAAGACCAC |
| | | TACCCCAGCACCGAGGCCACCCACCCCGGCTCCTACCATCGC |
| | | CTCCCAGCCTCTGTCCCTGCGTCCGGAGGCATGTAGACCCGCA |
| | | GCTGGTGGGGCCGTGCATACCCGGGGTCTTGACTTCGCCTGC |
| | | GATATCTACATTTGGGCCCCTCTGGCTGGTACTTGCGGGGTCC |
| | | TGCTGCTTTCACTCGTGATCACTCTTTACTGTAAGCGCGGTCG |
| | | GAAGAAGCTGCTGTACATCTTTAAGCAACCCTTCATGAGGCC |
| | | TGTGCAGACTACTCAAGAGGAGGACGGCTGTTCATGCCGGTT |
| | | CCCAGAGGAGGAGGAAGGCGGCTGCGAACTGCGCGTGAAAT |
| | | TCAGCCGCAGCGCAGATGCTCCAGCCTACAAGCAGGGGCAGA |
| | | ACCAGCTCTACAACGAACTCAATCTTGGTCGGAGAGAGGAGT |
| | | ACGACGTGCTGGACAAGCGGAGAGGACGGGACCCAGAAATG |
| | | GGCGGGAAGCCGCGCAGAAAGAATCCCCAAGAGGGCCTGTA |
| | | CAACGAGCTCCAAAAGGATAAGATGGCAGAAGCCTATAGCG |
| | | AGATTGGTATGAAAGGGGAACGCAGAAGAGGCAAAGGCCAC |
| | | GACGGACTGTACCAGGGACTCAGCACCGCCACCAAGGACACC |
| | | TATGACGCTCTTCACATGCAGGCCCTGCCGCCTCGG |

139111

| | | |
|---|---|---|
| 139111-aa | 1418 | EVQLLESGGGLVQPGGSLRLSCAVSGFALSNHGMSWVRRAPGK |
| ScFv | | GLEWVSGIVYSGSTYYAASVKGRFTISRDNSRNTLYLQMNSLRP |
| domain | | EDTAIYYCSAHGGESDVWGQGTTVTVSSASGGGGSGGRASGGG |
| | | GSDIVMTQTPLSLSVTPGQPASISCKSSQSLLRNDGKTPLYWYLQ |
| | | KAGQPPQLLIYEVSNRFSGVPDRFSGSGSGTDFTLKISRVEAEDV |
| | | GAYYCMQNIQFPSFGGGTKLEIK |
| 139111-nt | 1419 | GAAGTGCAATTGTTGGAATCTGGAGGAGGACTTGTGCAGCCT |
| ScFv | | GGAGGATCACTGAGACTTTCGTGTGCGGTGTCAGGCTTCGCC |
| domain | | CTGAGCAACCACGGCATGAGCTGGGTGCGGAGAGCCCCGGG |
| | | GAAGGGTCTGGAATGGGTGTCCGGGATCGTCTACTCCGGTTC |
| | | AACTTACTACGCCGCAAGCGTGAAGGGTCGCTTCACCATTTCC |
| | | CGCGATAACTCCCGGAACACCCTGTACCTCCAAATGAACTCC |
| | | CTGCGGCCCGAGGACACCGCCATCTACTACTGTTCCGCGCAT |
| | | GGAGGAGAGTCCGATGTCTGGGGACAGGGCACTACCGTGACC |
| | | GTGTCGAGCGCCTCGGGGGGAGGAGGCTCCGGCGGTCGCGCC |
| | | TCCGGGGGGGGTGGCAGCGACATTGTGATGACGCAGACTCCA |
| | | CTCTCGCTGTCCGTGACCCCGGGACAGCCCGCGTCCATCTCGT |
| | | GCAAGAGCTCCCAGAGCCTGCTGAGGAACGACGGAAAGACT |
| | | CCTCTGTATTGGTACCTCCAGAAGGCTGGACAGCCCCCGCAA |
| | | CTGCTCATCTACGAAGTGTCAAATCGCTTCTCCGGGGTGCCGG |
| | | ATCGGTTTTCCGGCTCGGGATCGGGCACCGACTTCACCCTGAA |
| | | AATCTCCAGGGTCGAGGCCGAGGACGTGGGAGCCTACTACTG |
| | | CATGCAAAACATCCAGTTCCCTTCCTTCGGCGGCGGCACAAA |
| | | GCTGGAGATTAAG |
| 139111-aa | 1420 | EVQLLESGGGLVQPGGSLRLSCAVSGFALSNHGMSWVRRAPGK |
| VH | | GLEWVSGIVYSGSTYYAASVKGRFTISRDNSRNTLYLQMNSLRP |
| | | EDTAIYYCSAHGGESDVWGQGTTVTVSS |
| 139111-aa | 1421 | DIVMTQTPLSLSVTPGQPASISCKSSQSLLRNDGKTPLYWYLQKA |
| VL | | GQPPQLLIYEVSNRFSGVPDRFSGSGSGTDFTLKISRVEAEDVGA |
| | | YYCMQNIQFPSFGGGTKLEIK |
| 139111-aa | 1422 | MALPVTALLLPLALLLHAARPEVQLLESGGGLVQPGGSLRLSCA |
| Full CAR | | VSGFALSNHGMSWVRRAPGKGLEWVSGIVYSGSTYYAASVKGR |
| | | FTISRDNSRNTLYLQMNSLRPEDTAIYYCSAHGGESDVWGQGTT |
| | | VTVSSASGGGGSGGRASGGGGSDIVMTQTPLSLSVTPGQPASISC |
| | | KSSQSLLRNDGKTPLYWYLQKAGQPPQLLIYEVSNRFSGVPDRF |
| | | SGSGSGTDFTLKISRVEAEDVGAYYCMQNIQFPSFGGGTKLEIKT |
| | | TTPAPRPPTPAPTIASQPLSLRPEACRPAAGGAVHTRGLDFACDIY |
| | | IWAPLAGTCGVLLLSLVITLYCKRGRKKLLYIFKQPFMRPVQTTQ |
| | | EEDGCSCRFPEEEEGGCELRVKFSRSADAPAYKQGQNQLYNELN |
| | | LGRREEYDVLDKRRGRDPEMGGKPRRKNPQEGLYNELQKDKM |
| | | AEAYSEIGMKGERRRGKGHDGLYQGLSTATKDTYDALHMQAL |
| | | PPR |
| 139111-nt | 1423 | ATGGCCCTCCCTGTCACCGCCCTGCTGCTTCCGCTGGCTCTTC |
| Full CAR | | TGCTCCACGCCGCTCGGCCCGAAGTGCAATTGTTGGAATCTG |
| | | GAGGAGGACTTGTGCAGCCTGGAGGATCACTGAGACTTTCGT |
| | | GTGCGGTGTCAGGCTTCGCCCTGAGCAACCACGGCATGAGCT |
| | | GGGTGCGGAGAGCCCCGGGGAAGGGTCTGGAATGGGTGTCC |
| | | GGGATCGTCTACTCCGGTTCAACTTACTACGCCGCAAGCGTG |
| | | AAGGGTCGCTTCACCATTTCCCGCGATAACTCCCGGAACACC |
| | | CTGTACCTCCAAATGAACTCCCTGCGGCCCGAGGACACCGCC |
| | | ATCTACTACTGTTCCGCGCATGGAGGAGAGTCCGATGTCTGG |
| | | GGACAGGGCACTACCGTGACCGTGTCGAGCGCCTCGGGGGGA |
| | | GGAGGCTCCGGCGGTCGCGCCTCCGGGGGGGGTGGCAGCGAC |
| | | ATTGTGATGACGCAGACTCCACTCTCGCTGTCCGTGACCCCGG |
| | | GACAGCCCGCGTCCATCTCGTGCAAGAGCTCCCAGAGCCTGC |
| | | TGAGGAACGACGGAAAGACTCCTCTGTATTGGTACCTCCAGA |
| | | AGGCTGGACAGCCCCCGCAACTGCTCATCTACGAAGTGTCAA |
| | | ATCGCTTCTCCGGGGTGCCGGATCGGTTTTCCGGCTCGGGATC |
| | | GGGCACCGACTTCACCCTGAAAATCTCCAGGGTCGAGGCCGA |
| | | GGACGTGGGAGCCTACTACTGCATGCAAAACATCCAGTTCCC |
| | | TTCCTTCGGCGGCGGCACAAAGCTGGAGATTAAGACCACTAC |
| | | CCCAGCACCGAGGCCACCCACCCCGGCTCCTACCATCGCCTC |
| | | CCAGCCTCTGTCCCTGCGTCCGGAGGCATGTAGACCCGCAGC |
| | | TGGTGGGGCCGTGCATACCCGGGGTCTTGACTTCGCCTGCGAT |
| | | ATCTACATTTGGGCCCCTCTGGCTGGTACTTGCGGGGTCCTGC |
| | | TGCTTTCACTCGTGATCACTCTTTACTGTAAGCGCGGTCGGAA |
| | | GAAGCTGCTGTACATCTTTAAGCAACCCTTCATGAGGCCTGTG |
| | | CAGACTACTCAAGAGGAGGACGGCTGTTCATGCCGGTTCCCA |
| | | GAGGAGGAGGAAGGCGGCTGCGAACTGCGCGTGAAATTCAG |
| | | CCGCAGCGCAGATGCTCCAGCCTACAAGCAGGGGCAGAACCA |
| | | GCTCTACAACGAACTCAATCTTGGTCGGAGAGAGGAGTACGA |
| | | CGTGCTGGACAAGCGGAGAGGACGGGACCCAGAAATGGGCG |
| | | GGAAGCCGCGCAGAAAGAATCCCCAAGAGGGCCTGTACAAC |
| | | GAGCTCCAAAAGGATAAGATGGCAGAAGCCTATAGCGAGATT |
| | | GGTATGAAAGGGGAACGCAGAAGAGGCAAAGGCCACGACGG |
| | | ACTGTACCAGGGACTCAGCACCGCCACCAAGGACACCTATGA |
| | | CGCTCTTCACATGCAGGCCCTGCCGCCTCGG |

139100

| | | |
|---|---|---|
| 139100-aa | 1424 | QVQLVQSGAEVRKTGASVKVSCKASGYIFDNFGINWVRQAPGQ |
| ScFv | | GLEWMGWINPKNNNTNYAQKFQGRVTITADESTNTAYMEVSSL |
| domain | | RSEDTAVYYCARGPYYYQSYMDVWGQGTMVTVSSASGGGGSG |
| | | GRASGGGGSDIVMTQTPLSLPVTPGEPASISCRSSQSLLHSNGYN |
| | | YLNWYLQKPGQSPQLLIYLGSKRASGVPDRFSGSGSGTDFTLHIT |
| | | RVGAEDVGVYYCMQALQTPYTFGQGTKLEIK |
| 139100-nt | 1425 | CAAGTCCAACTCGTCCAGTCCGGCGCAGAAGTCAGAAAAACC |
| ScFv | | GGTGCTAGCGTGAAAGTGTCCTGCAAGGCCTCCGGCTACATT |
| domain | | TTCGATAACTTCGGAATCAACTGGGTCAGACAGGCCCCGGGC |
| | | CAGGGGCTGGAATGGATGGGATGGATCAACCCCAAGAACAA |
| | | CAACACCAACTACGCACAGAAGTTCCAGGGCCGCGTGACTAT |
| | | CACCGCCGATGAATCGACCAATACCGCCTACATGGAGGTGTC |
| | | CTCCCTGCGGTCGGAGGACACTGCCGTGTATTACTGCGCGAG |
| | | GGGCCCATACTACTACCAAAGCTACATGGACGTCTGGGGACA |
| | | GGGAACCATGGTGACCGTGTCATCCGCCTCCGGTGGTGGAGG |
| | | CTCCGGGGGGCGGGCTTCAGGAGGCGGAGGAAGCGATATTGT |
| | | GATGACCCAGACTCCGCTTAGCCTGCCCGTGACTCCTGGAGA |
| | | ACCGGCCTCCATTTCCTGCCGGTCCTCGCAATCACTCCTGCAT |
| | | TCCAACGGTTACAACTACCTGAATTGGTACCTCCAGAAGCCT |
| | | GGCCAGTCGCCCCAGTTGCTGATCTATCTGGGCTCGAAGCGC |
| | | GCCTCCGGGGTGCCTGACCGGTTTAGCGGATCTGGGAGCGGC |
| | | ACGGACTTCACTCTCCACATCACCCGCGTGGGAGCGGAGGAC |
| | | GTGGGAGTGTACTACTGTATGCAGGCGCTGCAGACTCCGTAC |
| | | ACATTCGGACAGGGCACCAAGCTGGAGATCAAG |
| 139100-aa | 1426 | QVQLVQSGAEVRKTGASVKVSCKASGYIFDNFGINWVRQAPGQ |
| VH | | GLEWMGWINPKNNNTNYAQKFQGRVTITADESTNTAYMEVSSL |
| | | RSEDTAVYYCARGPYYYQSYMDVWGQGTMVTVSS |
| 139100-aa | 1427 | DIVMTQTPLSLPVTPGEPASISCRSSQSLLHSNGYNYLNWYLQKP |
| VL | | GQSPQLLIYLGSKRASGVPDRFSGSGSGTDFTLHITRVGAEDVGV |
| | | YYCMQALQTPYTFGQGTKLEIK |
| 139100-aa | 1428 | MALPVTALLLPLALLLHAARPQVQLVQSGAEVRKTGASVKVSC |
| Full CAR | | KASGYIFDNFGINWVRQAPGQGLEWMGWINPKNNNTNYAQKF |
| | | QGRVTITADESTNTAYMEVSSLRSEDTAVYYCARGPYYYQSYM |
| | | DVWGQGTMVTVSSASGGGGSGGRASGGGGSDIVMTQTPLSLPV |
| | | TPGEPASISCRSSQSLLHSNGYNYLNWYLQKPGQSPQLLIYLGSK |
| | | RASGVPDRFSGSGSGTDFTLHITRVGAEDVGVYYCMQALQTPYT |
| | | FGQGTKLEIKTTTPAPRPPTPAPTIASQPLSLRPEACRPAAGGAVH |
| | | TRGLDFACDIYIWAPLAGTCGVLLLSLVITLYCKRGRKKLLYIFK |
| | | QPFMRPVQTTQEEDGCSCRFPEEEEGGCELRVKFSRSADAPAYK |
| | | QGQNQLYNELNLGRREEYDVLDKRRGRDPEMGGKPRRKNPQE |
| | | GLYNELQKDKMAEAYSEIGMKGERRRGKGHDGLYQGLSTATK |
| | | DTYDALHMQALPPR |
| 139100-nt | 1429 | ATGGCCCTCCCTGTCACCGCCCTGCTGCTTCCGCTGGCTCTTC |
| Full CAR | | TGCTCCACGCCGCTCGGCCCCAAGTCCAACTCGTCCAGTCCGG |
| | | CGCAGAAGTCAGAAAAACCGGTGCTAGCGTGAAAGTGTCCTG |
| | | CAAGGCCTCCGGCTACATTTTCGATAACTTCGGAATCAACTGG |
| | | GTCAGACAGGCCCCGGGCCAGGGGCTGGAATGGATGGGATG |
| | | GATCAACCCCAAGAACAACAACACCAACTACGCACAGAAGTT |
| | | CCAGGGCCGCGTGACTATCACCGCCGATGAATCGACCAATAC |
| | | CGCCTACATGGAGGTGTCCTCCCTGCGGTCGGAGGACACTGC |
| | | CGTGTATTACTGCGCGAGGGGCCCATACTACTACCAAAGCTA |
| | | CATGGACGTCTGGGGACAGGGAACCATGGTGACCGTGTCATC |
| | | CGCCTCCGGTGGTGGAGGCTCCGGGGGGCGGGCTTCAGGAGG |
| | | CGGAGGAAGCGATATTGTGATGACCCAGACTCCGCTTAGCCT |
| | | GCCCGTGACTCCTGGAGAACCGGCCTCCATTTCCTGCCGGTCC |
| | | TCGCAATCACTCCTGCATTCCAACGGTTACAACTACCTGAATT |
| | | GGTACCTCCAGAAGCCTGGCCAGTCGCCCCAGTTGCTGATCT |
| | | ATCTGGGCTCGAAGCGCGCCTCCGGGGTGCCTGACCGGTTTA |
| | | GCGGATCTGGGAGCGGCACGGACTTCACTCTCCACATCACCC |
| | | GCGTGGGAGCGGAGGACGTGGGAGTGTACTACTGTATGCAGG |
| | | CGCTGCAGACTCCGTACACATTCGGACAGGGCACCAAGCTGG |
| | | AGATCAAGACCACTACCCCAGCACCGAGGCCACCCACCCCGG |
| | | CTCCTACCATCGCCTCCCAGCCTCTGTCCCTGCGTCCGGAGGC |
| | | ATGTAGACCCGCAGCTGGTGGGGCCGTGCATACCCGGGGTCT |
| | | TGACTTCGCCTGCGATATCTACATTTGGGCCCCTCTGGCTGGT |
| | | ACTTGCGGGGTCCTGCTGCTTTCACTCGTGATCACTCTTTACT |
| | | GTAAGCGCGGTCGGAAGAAGCTGCTGTACATCTTTAAGCAAC |
| | | CCTTCATGAGGCCTGTGCAGACTACTCAAGAGGAGGACGGCT |
| | | GTTCATGCCGGTTCCCAGAGGAGGAGGAAGGCGGCTGCGAAC |
| | | TGCGCGTGAAATTCAGCCGCAGCGCAGATGCTCCAGCCTACA |
| | | AGCAGGGGCAGAACCAGCTCTACAACGAACTCAATCTTGGTC |
| | | GGAGAGAGGAGTACGACGTGCTGGACAAGCGGAGAGGACGG |
| | | GACCCAGAAATGGGCGGGAAGCCGCGCAGAAAGAATCCCCA |
| | | AGAGGGCCTGTACAACGAGCTCCAAAAGGATAAGATGGCAG |
| | | AAGCCTATAGCGAGATTGGTATGAAAGGGGAACGCAGAAGA |
| | | GGCAAAGGCCACGACGGACTGTACCAGGGACTCAGCACCGCC |
| | | ACCAAGGACACCTATGACGCTCTTCACATGCAGGCCCTGCCG |
| | | CCTCGG |

139101

| | | |
|---|---|---|
| 139101-aa | 1430 | QVQLQESGGGLVQPGGSLRLSCAASGFTFSSDAMTWVRQAPGK |
| ScFv | | GLEWVSVISGSGGTTYYADSVKGRFTISRDNSKNTLYLQMNSLR |
| domain | | AEDTAVYYCAKLDSSGYYYARGPRYWGQGTLVTVSSASGGGG |
| | | SGGRASGGGGSDIQLTQSPSSLSASVGDRVTITCRASQSISSYLN |
| | | WYQQKPGKAPKLLIYGASTLASGVPARFSGSGSGTHFTLTINSLQ |
| | | SEDSATYYCQQSYKRASFGQGTKVEIK |
| 139101-nt | 1431 | CAAGTGCAACTTCAAGAATCAGGCGGAGGACTCGTGCAGCCC |
| ScFv | | GGAGGATCATTGCGGCTCTCGTGCGCCGCCTCGGGCTTCACCT |
| domain | | TCTCGAGCGACGCCATGACCTGGGTCCGCCAGGCCCCGGGGA |
| | | AGGGGCTGGAATGGGTGTCTGTGATTTCCGGCTCCGGGGGAA |
| | | CTACGTACTACGCCGATTCCGTGAAAGGTCGCTTCACTATCTC |
| | | CCGGGACAACAGCAAGAACACCCTTTATCTGCAAATGAATTC |
| | | CCTCCGCGCCGAGGACACCGCCGTGTACTACTGCGCCAAGCT |
| | | GGACTCCTCGGGCTACTACTATGCCCGGGGTCCGAGATACTG |
| | | GGGACAGGGAACCCTCGTGACCGTGTCCTCCGCGTCCGGCGG |
| | | AGGAGGGTCGGGAGGGCGGGCCTCCGGCGGCGGCGGTTCGG |
| | | ACATCCAGCTGACCCAGTCCCCATCCTCACTGAGCGCAAGCG |
| | | TGGGCGACAGAGTCACCATTACATGCAGGGCGTCCCAGAGCA |
| | | TCAGCTCCTACCTGAACTGGTACCAACAGAAGCCTGGAAAGG |
| | | CTCCTAAGCTGTTGATCTACGGGGCTTCGACCCTGGCATCCGG |
| | | GGTGCCCGCGAGGTTTAGCGGAAGCGGTAGCGGCACTCACTT |
| | | CACTCTGACCATTAACAGCCTCCAGTCCGAGGATTCAGCCACT |
| | | TACTACTGTCAGCAGTCCTACAAGCGGGCCAGCTTCGGACAG |
| | | GGCACTAAGGTCGAGATCAAG |
| 139101-aa | 1432 | QVQLQESGGGLVQPGGSLRLSCAASGFTFSSDAMTWVRQAPGK |
| VH | | GLEWVSVISGSGGTTYYADSVKGRFTISRDNSKNTLYLQMNSLR |
| | | AEDTAVYYCAKLDSSGYYYARGPRYWGQGTLVTVSS |
| 139101-aa | 1433 | DIQLTQSPSSLSASVGDRVTITCRASQSISSYLNWYQQKPGKAPK |
| VL | | LLIYGASTLASGVPARFSGSGSGTHFTLTINSLQSEDSATYYCQQS |
| | | YKRASFGQGTKVEIK |
| 139101-aa | 1434 | MALPVTALLLPLALLLHAARPQVQLQESGGGLVQPGGSLRLSCA |
| Full CAR | | ASGFTFSSDAMTWVRQAPGKGLEWVSVISGSGGTTYYADSVKG |
| | | RFTISRDNSKNTLYLQMNSLRAEDTAVYYCAKLDSSGYYYARG |
| | | PRYWGQGTLVTVSSASGGGGSGGRASGGGGSDIQLTQSPSSLSA |
| | | SVGDRVTITCRASQSISSYLNWYQQKPGKAPKLLIYGASTLASGV |
| | | PARFSGSGSGTHFTLTINSLQSEDSATYYCQQSYKRASFGQGTKV |
| | | EIKTTTPAPRPPTPAPTIASQPLSLRPEACRPAAGGAVHTRGLDFA |
| | | CDIYIWAPLAGTCGVLLLSLVITLYCKRGRKKLLYIFKQPFMRPV |
| | | QTTQEEDGCSCRFPEEEEGGCELRVKFSRSADAPAYKQGQNQLY |
| | | NELNLGRREEYDVLDKRRGRDPEMGGKPRRKNPQEGLYNELQK |
| | | DKMAEAYSEIGMKGERRRGKGHDGLYQGLSTATKDTYDALHM |
| | | QALPPR |
| 139101-nt | 1435 | ATGGCCCTCCCTGTCACCGCCCTGCTGCTTCCGCTGGCTCTTC |
| Full CAR | | TGCTCCACGCCGCTCGGCCCCAAGTGCAACTTCAAGAATCAG |
| | | GCGGAGGACTCGTGCAGCCCGGAGGATCATTGCGGCTCTCGT |
| | | GCGCCGCCTCGGGCTTCACCTTCTCGAGCGACGCCATGACCTG |
| | | GGTCCGCCAGGCCCCGGGGAAGGGGCTGGAATGGGTGTCTGT |
| | | GATTTCCGGCTCCGGGGGAACTACGTACTACGCCGATTCCGT |
| | | GAAAGGTCGCTTCACTATCTCCCGGGACAACAGCAAGAACAC |
| | | CCTTTATCTGCAAATGAATTCCCTCCGCGCCGAGGACACCGCC |
| | | GTGTACTACTGCGCCAAGCTGGACTCCTCGGGCTACTACTATG |
| | | CCCGGGGTCCGAGATACTGGGGACAGGGAACCCTCGTGACCG |
| | | TGTCCTCCGCGTCCGGCGGAGGAGGGTCGGGAGGGCGGGCCT |
| | | CCGGCGGCGGCGGTTCGGACATCCAGCTGACCCAGTCCCCAT |
| | | CCTCACTGAGCGCAAGCGTGGGCGACAGAGTCACCATTACAT |
| | | GCAGGGCGTCCCAGAGCATCAGCTCCTACCTGAACTGGTACC |
| | | AACAGAAGCCTGGAAAGGCTCCTAAGCTGTTGATCTACGGGG |
| | | CTTCGACCCTGGCATCCGGGGTGCCCGCGAGGTTTAGCGGAA |
| | | GCGGTAGCGGCACTCACTTCACTCTGACCATTAACAGCCTCCA |
| | | GTCCGAGGATTCAGCCACTTACTACTGTCAGCAGTCCTACAA |
| | | GCGGGCCAGCTTCGGACAGGGCACTAAGGTCGAGATCAAGAC |
| | | CACTACCCCAGCACCGAGGCCACCCACCCCGGCTCCTACCAT |
| | | CGCCTCCCAGCCTCTGTCCCTGCGTCCGGAGGCATGTAGACCC |
| | | GCAGCTGGTGGGGCCGTGCATACCCGGGGTCTTGACTTCGCC |
| | | TGCGATATCTACATTTGGGCCCCTCTGGCTGGTACTTGCGGGG |
| | | TCCTGCTGCTTTCACTCGTGATCACTCTTTACTGTAAGCGCGG |
| | | TCGGAAGAAGCTGCTGTACATCTTTAAGCAACCCTTCATGAG |
| | | GCCTGTGCAGACTACTCAAGAGGAGGACGGCTGTTCATGCCG |
| | | GTTCCCAGAGGAGGAGGAAGGCGGCTGCGAACTGCGCGTGA |
| | | AATTCAGCCGCAGCGCAGATGCTCCAGCCTACAAGCAGGGGC |
| | | AGAACCAGCTCTACAACGAACTCAATCTTGGTCGGAGAGAGG |
| | | AGTACGACGTGCTGGACAAGCGGAGAGGACGGGACCCAGAA |
| | | ATGGGCGGGAAGCCGCGCAGAAAGAATCCCCAAGAGGGCCT |
| | | GTACAACGAGCTCCAAAAGGATAAGATGGCAGAAGCCTATA |
| | | GCGAGATTGGTATGAAAGGGGAACGCAGAAGAGGCAAAGGC |
| | | CACGACGGACTGTACCAGGGACTCAGCACCGCCACCAAGGAC |
| | | ACCTATGACGCTCTTCACATGCAGGCCCTGCCGCCTCGG |

139102

| | | |
|---|---|---|
| 139102-aa | 1436 | QVQLVQSGAEVKKPGASVKVSCKASGYTFSNYGITWVRQAPGQ |
| ScFv | | GLEWMGWISAYNGNTNYAQKFQGRVTMTRNTSISTAYMELSSL |
| domain | | RSEDTAVYYCARGPYYYYMDVWGKGTMVTVSSASGGGGSGG |
| | | RASGGGGSEIVMTQSPLSLPVTPGEPASISCRSSQSLLYSNGYNY |
| | | VDWYLQKPGQSPQLLIYLGSNRASGVPDRFSGSGSGTDFKLQISR |
| | | VEAEDVGIYYCMQGRQFPYSFGQGTKVEIK |
| 139102-nt | 1437 | CAAGTCCAACTGGTCCAGAGCGGTGCAGAAGTGAAGAAGCCC |
| ScFv | | GGAGCGAGCGTGAAAGTGTCCTGCAAGGCTTCCGGGTACACC |
| domain | | TTCTCCAACTACGGCATCACTTGGGTGCGCCAGGCCCCGGGA |
| | | CAGGGCCTGGAATGGATGGGGTGGATTTCCGCGTACAACGGC |
| | | AATACGAACTACGCTCAGAAGTTCCAGGGTAGAGTGACCATG |
| | | ACTAGGAACACCTCCATTTCCACCGCCTACATGGAACTGTCCT |
| | | CCCTGCGGAGCGAGGACACCGCCGTGTACTATTGCGCCCGGG |
| | | GACCATACTACTACTACATGGATGTCTGGGGGAAGGGGACTA |
| | | TGGTCACCGTGTCATCCGCCTCGGGAGGCGGCGGATCAGGAG |
| | | GACGCGCCTCTGGTGGTGGAGGATCGGAGATCGTGATGACCC |
| | | AGAGCCCTCTCTCCTTGCCCGTGACTCCTGGGGAGCCCGCATC |
| | | CATTTCATGCCGGAGCTCCCAGTCACTTCTCTACTCCAACGGC |
| | | TATAACTACGTGGATTGGTACCTCCAAAAGCCGGGCCAGAGC |
| | | CCGCAGCTGCTGATCTACCTGGGCTCGAACAGGGCCAGCGGA |
| | | GTGCCTGACCGGTTCTCCGGGTCGGGAAGCGGGACCGACTTC |
| | | AAGCTGCAAATCTCGAGAGTGGAGGCCGAGGACGTGGGAAT |
| | | CTACTACTGTATGCAGGGCCGCCAGTTTCCGTACTCGTTCGGA |
| | | CAGGGCACCAAAGTGGAAATCAAG |
| 139102-aa | 1438 | QVQLVQSGAEVKKPGASVKVSCKASGYTFSNYGITWVRQAPGQ |
| VH | | GLEWMGWISAYNGNTNYAQKFQGRVTMTRNTSISTAYMELSSL |
| | | RSEDTAVYYCARGPYYYYMDVWGKGTMVTVSS |
| 139102-aa | 1439 | EIVMTQSPLSLPVTPGEPASISCRSSQSLLYSNGYNYVDWYLQKP |
| VL | | GQSPQLLIYLGSNRASGVPDRFSGSGSGTDFKLQISRVEAEDVGI |
| | | YYCMQGRQFPYSFGQGTKVEIK |
| 139102-aa | 1440 | MALPVTALLLPLALLLHAARPQVQLVQSGAEVKKPGASVKVSC |
| Full CAR | | KASGYTFSNYGITWVRQAPGQGLEWMGWISAYNGNTNYAQKF |
| | | QGRVTMTRNTSISTAYMELSSLRSEDTAVYYCARGPYYYYMDV |
| | | WGKGTMVTVSSASGGGGSGGRASGGGGSEIVMTQSPLSLPVTP |
| | | GEPASISCRSSQSLLYSNGYNYVDWYLQKPGQSPQLLIYLGSNRA |
| | | SGVPDRFSGSGSGTDFKLQISRVEAEDVGIYYCMQGRQFPYSFG |
| | | QGTKVEIKTTTPAPRPPTPAPTIASQPLSLRPEACRPAAGGAVHTR |
| | | GLDFACDIYIWAPLAGTCGVLLLSLVITLYCKRGRKKLLYIFKQP |
| | | FMRPVQTTQEEDGCSCRFPEEEEGGCELRVKFSRSADAPAYKQG |
| | | QNQLYNELNLGRREEYDVLDKRRGRDPEMGGKPRRKNPQEGL |
| | | YNELQKDKMAEAYSEIGMKGERRRGKGHDGLYQGLSTATKDT |
| | | YDALHMQALPPR |
| 139102-nt | 1441 | ATGGCCCTCCCTGTCACCGCCCTGCTGCTTCCGCTGGCTCTTC |
| Full CAR | | TGCTCCACGCCGCTCGGCCCCAAGTCCAACTGGTCCAGAGCG |
| | | GTGCAGAAGTGAAGAAGCCCGGAGCGAGCGTGAAAGTGTCC |
| | | TGCAAGGCTTCCGGGTACACCTTCTCCAACTACGGCATCACTT |
| | | GGGTGCGCCAGGCCCCGGGACAGGGCCTGGAATGGATGGGG |
| | | TGGATTTCCGCGTACAACGGCAATACGAACTACGCTCAGAAG |
| | | TTCCAGGGTAGAGTGACCATGACTAGGAACACCTCCATTTCC |
| | | ACCGCCTACATGGAACTGTCCTCCCTGCGGAGCGAGGACACC |
| | | GCCGTGTACTATTGCGCCCGGGGACCATACTACTACTACATG |
| | | GATGTCTGGGGGAAGGGGACTATGGTCACCGTGTCATCCGCC |
| | | TCGGGAGGCGGCGGATCAGGAGGACGCGCCTCTGGTGGTGGA |
| | | GGATCGGAGATCGTGATGACCCAGAGCCCTCTCTCCTTGCCC |
| | | GTGACTCCTGGGGAGCCCGCATCCATTTCATGCCGGAGCTCCC |
| | | AGTCACTTCTCTACTCCAACGGCTATAACTACGTGGATTGGTA |
| | | CCTCCAAAAGCCGGGCCAGAGCCCGCAGCTGCTGATCTACCT |
| | | GGGCTCGAACAGGGCCAGCGGAGTGCCTGACCGGTTCTCCGG |
| | | GTCGGGAAGCGGGACCGACTTCAAGCTGCAAATCTCGAGAGT |
| | | GGAGGCCGAGGACGTGGGAATCTACTACTGTATGCAGGGCCG |
| | | CCAGTTTCCGTACTCGTTCGGACAGGGCACCAAAGTGGAAAT |
| | | CAAGACCACTACCCCAGCACCGAGGCCACCCACCCCGGCTCC |
| | | TACCATCGCCTCCCAGCCTCTGTCCCTGCGTCCGGAGGCATGT |
| | | AGACCCGCAGCTGGTGGGGCCGTGCATACCCGGGGTCTTGAC |
| | | TTCGCCTGCGATATCTACATTTGGGCCCCTCTGGCTGGTACTT |
| | | GCGGGGTCCTGCTGCTTTCACTCGTGATCACTCTTTACTGTAA |
| | | GCGCGGTCGGAAGAAGCTGCTGTACATCTTTAAGCAACCCTT |
| | | CATGAGGCCTGTGCAGACTACTCAAGAGGAGGACGGCTGTTC |
| | | ATGCCGGTTCCCAGAGGAGGAGGAAGGCGGCTGCGAACTGC |
| | | GCGTGAAATTCAGCCGCAGCGCAGATGCTCCAGCCTACAAGC |
| | | AGGGGCAGAACCAGCTCTACAACGAACTCAATCTTGGTCGGA |
| | | GAGAGGAGTACGACGTGCTGGACAAGCGGAGAGGACGGGAC |
| | | CCAGAAATGGGCGGGAAGCCGCGCAGAAAGAATCCCCAAGA |
| | | GGGCCTGTACAACGAGCTCCAAAAGGATAAGATGGCAGAAG |
| | | CCTATAGCGAGATTGGTATGAAAGGGGAACGCAGAAGAGGC |
| | | AAAGGCCACGACGGACTGTACCAGGGACTCAGCACCGCCACC |
| | | AAGGACACCTATGACGCTCTTCACATGCAGGCCCTGCCGCCT |
| | | CGG |

139104

| | | |
|---|---|---|
| 139104-aa | 1442 | EVQLLETGGGLVQPGGSLRLSCAVSGFALSNHGMSWVRRAPGK |
| ScFv | | GLEWVSGIVYSGSTYYAASVKGRFTISRDNSRNTLYLQMNSLRP |
| domain | | EDTAIYYCSAHGGESDVWGQGTTVTVSSASGGGGSGGRASGGG |
| | | GSEIVLTQSPATLSVSPGESATLSCRASQSVSSNLAWYQQKPGQA |
| | | PRLLIYGASTRASGIPDRFSGSGSGTDFTLTISSLQAEDVAVYYCQ |
| | | QYGSSLTFGGGTKVEIK |
| 139104-nt | 1443 | GAAGTGCAATTGCTCGAAACTGGAGGAGGTCTGGTGCAACCT |
| ScFv | | GGAGGATCACTTCGCCTGTCCTGCGCCGTGTCGGGCTTTGCCC |
| domain | | TGTCCAACCATGGAATGAGCTGGGTCCGCCGCGCGCCGGGGA |
| | | AGGGCCTCGAATGGGTGTCCGGCATCGTCTACTCCGGCTCCA |
| | | CCTACTACGCCGCGTCCGTGAAGGGCCGGTTCACGATTTCAC |
| | | GGGACAACTCGCGGAACACCCTGTACCTCCAAATGAATTCCC |
| | | TTCGGCCGGAGGATACTGCCATCTACTACTGCTCCGCCCACGG |
| | | TGGCGAATCCGACGTCTGGGGCCAGGGAACCACCGTGACCGT |
| | | GTCCAGCGCGTCCGGGGGAGGAGGAAGCGGGGGTAGAGCAT |
| | | CGGGTGGAGGCGGATCAGAGATCGTGCTGACCCAGTCCCCCG |
| | | CCACCTTGAGCGTGTCACCAGGAGAGTCCGCCACCCTGTCAT |
| | | GCCGCGCCAGCCAGTCCGTGTCCTCCAACCTGGCTTGGTACCA |
| | | GCAGAAGCCGGGGCAGGCCCCTAGACTCCTGATCTATGGGGC |
| | | GTCGACCCGGGCATCTGGAATTCCCGATAGGTTCAGCGGATC |
| | | GGGCTCGGGCACTGACTTCACTCTGACCATCTCCTCGCTGCAA |
| | | GCCGAGGACGTGGCTGTGTACTACTGTCAGCAGTACGGAAGC |
| | | TCCCTGACTTTCGGTGGCGGGACCAAAGTCGAGATTAAG |
| 139104-aa | 1444 | EVQLLETGGGLVQPGGSLRLSCAVSGFALSNHGMSWVRRAPGK |
| VH | | GLEWVSGIVYSGSTYYAASVKGRFTISRDNSRNTLYLQMNSLRP |
| | | EDTAIYYCSAHGGESDVWGQGTTVTVSS |
| 139104-aa | 1445 | EIVLTQSPATLSVSPGESATLSCRASQSVSSNLAWYQQKPGQAPR |
| VL | | LLIYGASTRASGIPDRFSGSGSGTDFTLTISSLQAEDVAVYYCQQ |
| | | YGSSLTFGGGTKVEIK |
| 139104-aa | 1446 | MALPVTALLLPLALLLHAARPEVQLLETGGGLVQPGGSLRLSCA |
| Full CAR | | VSGFALSNHGMSWVRRAPGKGLEWVSGIVYSGSTYYAASVKGR |
| | | FTISRDNSRNTLYLQMNSLRPEDTAIYYCSAHGGESDVWGQGTT |
| | | VTVSSASGGGGSGGRASGGGGSEIVLTQSPATLSVSPGESATLSC |
| | | RASQSVSSNLAWYQQKPGQAPRLLIYGASTRASGIPDRFSGSGSG |
| | | TDFTLTISSLQAEDVAVYYCQQYGSSLTFGGGTKVEIKTTTPAPR |
| | | PPTPAPTIASQPLSLRPEACRPAAGGAVHTRGLDFACDIYIWAPL |
| | | AGTCGVLLLSLVITLYCKRGRKKLLYIFKQPFMRPVQTTQEEDG |
| | | CSCRFPEEEEGGCELRVKFSRSADAPAYKQGQNQLYNELNLGRR |
| | | EEYDVLDKRRGRDPEMGGKPRRKNPQEGLYNELQKDKMAEAY |
| | | SEIGMKGERRRGKGHDGLYQGLSTATKDTYDALHMQALPPR |
| 139104-nt | 1447 | ATGGCCCTCCCTGTCACCGCCCTGCTGCTTCCGCTGGCTCTTC |
| Full CAR | | TGCTCCACGCCGCTCGGCCCGAAGTGCAATTGCTCGAAACTG |
| | | GAGGAGGTCTGGTGCAACCTGGAGGATCACTTCGCCTGTCCT |
| | | GCGCCGTGTCGGGCTTTGCCCTGTCCAACCATGGAATGAGCT |
| | | GGGTCCGCCGCGCGCCGGGGAAGGGCCTCGAATGGGTGTCCG |
| | | GCATCGTCTACTCCGGCTCCACCTACTACGCCGCGTCCGTGAA |
| | | GGGCCGGTTCACGATTTCACGGGACAACTCGCGGAACACCCT |
| | | GTACCTCCAAATGAATTCCCTTCGGCCGGAGGATACTGCCATC |
| | | TACTACTGCTCCGCCCACGGTGGCGAATCCGACGTCTGGGGC |
| | | CAGGGAACCACCGTGACCGTGTCCAGCGCGTCCGGGGGAGGA |
| | | GGAAGCGGGGGTAGAGCATCGGGTGGAGGCGGATCAGAGAT |
| | | CGTGCTGACCCAGTCCCCCGCCACCTTGAGCGTGTCACCAGG |
| | | AGAGTCCGCCACCCTGTCATGCCGCGCCAGCCAGTCCGTGTC |
| | | CTCCAACCTGGCTTGGTACCAGCAGAAGCCGGGGCAGGCCCC |
| | | TAGACTCCTGATCTATGGGGCGTCGACCCGGGCATCTGGAAT |
| | | TCCCGATAGGTTCAGCGGATCGGGCTCGGGCACTGACTTCAC |
| | | TCTGACCATCTCCTCGCTGCAAGCCGAGGACGTGGCTGTGTAC |
| | | TACTGTCAGCAGTACGGAAGCTCCCTGACTTTCGGTGGCGGG |
| | | ACCAAAGTCGAGATTAAGACCACTACCCCAGCACCGAGGCCA |
| | | CCCACCCCGGCTCCTACCATCGCCTCCCAGCCTCTGTCCCTGC |
| | | GTCCGGAGGCATGTAGACCCGCAGCTGGTGGGGCCGTGCATA |
| | | CCCGGGGTCTTGACTTCGCCTGCGATATCTACATTTGGGCCCC |
| | | TCTGGCTGGTACTTGCGGGGTCCTGCTGCTTTCACTCGTGATC |
| | | ACTCTTTACTGTAAGCGCGGTCGGAAGAAGCTGCTGTACATCT |
| | | TTAAGCAACCCTTCATGAGGCCTGTGCAGACTACTCAAGAGG |
| | | AGGACGGCTGTTCATGCCGGTTCCCAGAGGAGGAGGAAGGCG |
| | | GCTGCGAACTGCGCGTGAAATTCAGCCGCAGCGCAGATGCTC |
| | | CAGCCTACAAGCAGGGGCAGAACCAGCTCTACAACGAACTCA |
| | | ATCTTGGTCGGAGAGAGGAGTACGACGTGCTGGACAAGCGGA |
| | | GAGGACGGGACCCAGAAATGGGCGGGAAGCCGCGCAGAAAG |
| | | AATCCCCAAGAGGGCCTGTACAACGAGCTCCAAAAGGATAAG |
| | | ATGGCAGAAGCCTATAGCGAGATTGGTATGAAAGGGGAACG |
| | | CAGAAGAGGCAAAGGCCACGACGGACTGTACCAGGGACTCA |
| | | GCACCGCCACCAAGGACACCTATGACGCTCTTCACATGCAGG |
| | | CCCTGCCGCCTCGG |

139106

| | | |
|---|---|---|
| 139106-aa | 1448 | EVQLVETGGGLVQPGGSLRLSCAVSGFALSNHGMSWVRRAPGK |
| ScFv | | GLEWVSGIVYSGSTYYAASVKGRFTISRDNSRNTLYLQMNSLRP |
| domain | | EDTAIYYCSAHGGESDVWGQGTTVTVSSASGGGGSGGRASGGG |
| | | GSEIVMTQSPATLSVSPGERATLSCRASQSVSSKLAWYQQKPGQ |
| | | APRLLMYGASIRATGIPDRFSGSGSGTEFTLTISSLEPEDFAVYYC |
| | | QQYGSSSWTFGQGTKVEIK |
| 139106-nt | 1449 | GAAGTGCAATTGGTGGAAACTGGAGGAGGACTTGTGCAACCT |
| ScFv | | GGAGGATCATTGAGACTGAGCTGCGCAGTGTCGGGATTCGCC |
| domain | | CTGAGCAACCATGGAATGTCCTGGGTCAGAAGGGCCCCTGGA |
| | | AAAGGCCTCGAATGGGTGTCAGGGATCGTGTACTCCGGTTCC |
| | | ACTTACTACGCCGCCTCCGTGAAGGGGCGCTTCACTATCTCAC |
| | | GGGATAACTCCCGCAATACCCTGTACCTCCAAATGAACAGCC |
| | | TGCGGCCGGAGGATACCGCCATCTACTACTGTTCCGCCCACG |
| | | GTGGAGAGTCTGACGTCTGGGGCCAGGGAACTACCGTGACCG |
| | | TGTCCTCCGCGTCCGGCGGTGGAGGGAGCGGCGGCCGCGCCA |
| | | GCGGCGGCGGAGGCTCCGAGATCGTGATGACCCAGAGCCCCG |
| | | CTACTCTGTCGGTGTCGCCCGGAGAAAGGGCGACCCTGTCCT |
| | | GCCGGGCGTCGCAGTCCGTGAGCAGCAAGCTGGCTTGGTACC |
| | | AGCAGAAGCCGGGCCAGGCACCACGCCTGCTTATGTACGGTG |
| | | CCTCCATTCGGGCCACCGGAATCCCGGACCGGTTCTCGGGGT |
| | | CGGGGTCCGGTACCGAGTTCACACTGACCATTTCCTCGCTCGA |
| | | GCCCGAGGACTTTGCCGTCTATTACTGCCAGCAGTACGGCTCC |
| | | TCCTCATGGACGTTCGGCCAGGGGACCAAGGTCGAAATCAAG |
| 139106-aa | 1450 | EVQLVETGGGLVQPGGSLRLSCAVSGFALSNHGMSWVRRAPGK |
| VH | | GLEWVSGIVYSGSTYYAASVKGRFTISRDNSRNTLYLQMNSLRP |
| | | EDTAIYYCSAHGGESDVWGQGTTVTVSS |
| 139106-aa | 1451 | EIVMTQSPATLSVSPGERATLSCRASQSVSSKLAWYQQKPGQAP |
| VL | | RLLMYGASIRATGIPDRFSGSGSGTEFTLTISSLEPEDFAVYYCQQ |
| | | YGSSSWTFGQGTKVEIK |
| 139106-aa | 1452 | MALPVTALLLPLALLLHAARPEVQLVETGGGLVQPGGSLRLSCA |
| Full CAR | | VSGFALSNHGMSWVRRAPGKGLEWVSGIVYSGSTYYAASVKGR |
| | | FTISRDNSRNTLYLQMNSLRPEDTAIYYCSAHGGESDVWGQGTT |
| | | VTVSSASGGGGSGGRASGGGGSEIVMTQSPATLSVSPGERATLS |
| | | CRASQSVSSKLAWYQQKPGQAPRLLMYGASIRATGIPDRFSGSG |
| | | SGTEFTLTISSLEPEDFAVYYCQQYGSSSWTFGQGTKVEIKTTTP |
| | | APRPPTPAPTIASQPLSLRPEACRPAAGGAVHTRGLDFACDIYIW |
| | | APLAGTCGVLLLSLVITLYCKRGRKKLLYIFKQPFMRPVQTTQEE |
| | | DGCSCRFPEEEEGGCELRVKFSRSADAPAYKQGQNQLYNELNLG |
| | | RREEYDVLDKRRGRDPEMGGKPRRKNPQEGLYNELQKDKMAE |
| | | AYSEIGMKGERRRGKGHDGLYQGLSTATKDTYDALHMQALPPR |
| 139106-nt | 1453 | ATGGCCCTCCCTGTCACCGCCCTGCTGCTTCCGCTGGCTCTTC |
| Full CAR | | TGCTCCACGCCGCTCGGCCCGAAGTGCAATTGGTGGAAACTG |
| | | GAGGAGGACTTGTGCAACCTGGAGGATCATTGAGACTGAGCT |
| | | GCGCAGTGTCGGGATTCGCCCTGAGCAACCATGGAATGTCCT |
| | | GGGTCAGAAGGGCCCCTGGAAAAGGCCTCGAATGGGTGTCAG |
| | | GGATCGTGTACTCCGGTTCCACTTACTACGCCGCCTCCGTGAA |
| | | GGGGCGCTTCACTATCTCACGGGATAACTCCCGCAATACCCT |
| | | GTACCTCCAAATGAACAGCCTGCGGCCGGAGGATACCGCCAT |
| | | CTACTACTGTTCCGCCCACGGTGGAGAGTCTGACGTCTGGGG |
| | | CCAGGGAACTACCGTGACCGTGTCCTCCGCGTCCGGCGGTGG |
| | | AGGGAGCGGCGGCCGCGCCAGCGGCGGCGGAGGCTCCGAGA |
| | | TCGTGATGACCCAGAGCCCCGCTACTCTGTCGGTGTCGCCCGG |
| | | AGAAAGGGCGACCCTGTCCTGCCGGGCGTCGCAGTCCGTGAG |
| | | CAGCAAGCTGGCTTGGTACCAGCAGAAGCCGGGCCAGGCACC |
| | | ACGCCTGCTTATGTACGGTGCCTCCATTCGGGCCACCGGAATC |
| | | CCGGACCGGTTCTCGGGGTCGGGGTCCGGTACCGAGTTCACA |
| | | CTGACCATTTCCTCGCTCGAGCCCGAGGACTTTGCCGTCTATT |
| | | ACTGCCAGCAGTACGGCTCCTCCTCATGGACGTTCGGCCAGG |
| | | GGACCAAGGTCGAAATCAAGACCACTACCCCAGCACCGAGGC |
| | | CACCCACCCCGGCTCCTACCATCGCCTCCCAGCCTCTGTCCCT |
| | | GCGTCCGGAGGCATGTAGACCCGCAGCTGGTGGGGCCGTGCA |
| | | TACCCGGGGTCTTGACTTCGCCTGCGATATCTACATTTGGGCC |
| | | CCTCTGGCTGGTACTTGCGGGGTCCTGCTGCTTTCACTCGTGA |
| | | TCACTCTTTACTGTAAGCGCGGTCGGAAGAAGCTGCTGTACAT |
| | | CTTTAAGCAACCCTTCATGAGGCCTGTGCAGACTACTCAAGA |
| | | GGAGGACGGCTGTTCATGCCGGTTCCCAGAGGAGGAGGAAG |
| | | GCGGCTGCGAACTGCGCGTGAAATTCAGCCGCAGCGCAGATG |
| | | CTCCAGCCTACAAGCAGGGGCAGAACCAGCTCTACAACGAAC |
| | | TCAATCTTGGTCGGAGAGAGGAGTACGACGTGCTGGACAAGC |
| | | GGAGAGGACGGGACCCAGAAATGGGCGGGAAGCCGCGCAGA |
| | | AAGAATCCCCAAGAGGGCCTGTACAACGAGCTCCAAAAGGAT |
| | | AAGATGGCAGAAGCCTATAGCGAGATTGGTATGAAAGGGGA |
| | | ACGCAGAAGAGGCAAAGGCCACGACGGACTGTACCAGGGAC |
| | | TCAGCACCGCCACCAAGGACACCTATGACGCTCTTCACATGC |
| | | AGGCCCTGCCGCCTCGG |

139107

| | | |
|---|---|---|
| 139107-aa | 1454 | EVQLVETGGGVVQPGGSLRLSCAVSGFALSNHGMSWVRRAPGK |
| ScFv | | GLEWVSGIVYSGSTYYAASVKGRFTISRDNSRNTLYLQMNSLRP |
| domain | | EDTAIYYCSAHGGESDVWGQGTTVTVSSASGGGGSGGRASGGG |
| | | GSEIVLTQSPGTLSLSPGERATLSCRASQSVGSTNLAWYQQKPGQ |
| | | APRLLIYDASNRATGIPDRFSGGGSGTDFTLTISRLEPEDFAVYYC |
| | | QQYGSSPPWTFGQGTKVEIK |
| 139107-nt | 1455 | GAAGTGCAATTGGTGGAGACTGGAGGAGGAGTGGTGCAACCT |
| ScFv | | GGAGGAAGCCTGAGACTGTCATGCGCGGTGTCGGGCTTCGCC |
| domain | | CTCTCCAACCACGGAATGTCCTGGGTCCGCCGGGCCCCTGGG |
| | | AAAGGACTTGAATGGGTGTCCGGCATCGTGTACTCGGGTTCC |
| | | ACCTACTACGCGGCCTCAGTGAAGGGCCGGTTTACTATTAGC |
| | | CGCGACAACTCCAGAAACACACTGTACCTCCAAATGAACTCG |
| | | CTGCGGCCGGAAGATACCGCTATCTACTACTGCTCCGCCCATG |
| | | GGGGAGAGTCGGACGTCTGGGGACAGGGCACCACTGTCACTG |
| | | TGTCCAGCGCTTCCGGCGGTGGTGGAAGCGGGGGACGGGCCT |
| | | CAGGAGGCGGTGGCAGCGAGATTGTGCTGACCCAGTCCCCCG |
| | | GGACCCTGAGCCTGTCCCCGGGAGAAAGGGCCACCCTCTCCT |
| | | GTCGGGCATCCCAGTCCGTGGGGTCTACTAACCTTGCATGGTA |
| | | CCAGCAGAAGCCCGGCCAGGCCCCTCGCCTGCTGATCTACGA |
| | | CGCGTCCAATAGAGCCACCGGCATCCCGGATCGCTTCAGCGG |
| | | AGGCGGATCGGGCACCGACTTCACCCTCACCATTTCAAGGCT |
| | | GGAACCGGAGGACTTCGCCGTGTACTACTGCCAGCAGTATGG |
| | | TTCGTCCCCACCCTGGACGTTCGGCCAGGGGACTAAGGTCGA |
| | | GATCAAG |
| 139107-aa | 1456 | EVQLVETGGGVVQPGGSLRLSCAVSGFALSNHGMSWVRRAPGK |
| VH | | GLEWVSGIVYSGSTYYAASVKGRFTISRDNSRNTLYLQMNSLRP |
| | | EDTAIYYCSAHGGESDVWGQGTTVTVSS |
| 139107-aa | 1457 | EIVLTQSPGTLSLSPGERATLSCRASQSVGSTNLAWYQQKPGQAP |
| VL | | RLLIYDASNRATGIPDRFSGGGSGTDFTLTISRLEPEDFAVYYCQQ |
| | | YGSSPPWTFGQGTKVEIK |
| 139107-aa | 1458 | MALPVTALLLPLALLLHAARPEVQLVETGGGVVQPGGSLRLSCA |
| Full CAR | | VSGFALSNHGMSWVRRAPGKGLEWVSGIVYSGSTYYAASVKGR |
| | | FTISRDNSRNTLYLQMNSLRPEDTAIYYCSAHGGESDVWGQGTT |
| | | VTVSSASGGGGSGGRASGGGGSEIVLTQSPGTLSLSPGERATLSC |
| | | RASQSVGSTNLAWYQQKPGQAPRLLIYDASNRATGIPDRFSGGG |
| | | SGTDFTLTISRLEPEDFAVYYCQQYGSSPPWTFGQGTKVEIKTTT |
| | | PAPRPPTPAPTIASQPLSLRPEACRPAAGGAVHTRGLDFACDIYIW |
| | | APLAGTCGVLLLSLVITLYCKRGRKKLLYIFKQPFMRPVQTTQEE |
| | | DGCSCRFPEEEEGGCELRVKFSRSADAPAYKQGQNQLYNELNLG |
| | | RREEYDVLDKRRGRDPEMGGKPRRKNPQEGLYNELQKDKMAE |
| | | AYSEIGMKGERRRGKGHDGLYQGLSTATKDTYDALHMQALPPR |
| 139107-nt | 1459 | ATGGCCCTCCCTGTCACCGCCCTGCTGCTTCCGCTGGCTCTTC |
| Full CAR | | TGCTCCACGCCGCTCGGCCCGAAGTGCAATTGGTGGAGACTG |
| | | GAGGAGGAGTGGTGCAACCTGGAGGAAGCCTGAGACTGTCAT |
| | | GCGCGGTGTCGGGCTTCGCCCTCTCCAACCACGGAATGTCCTG |
| | | GGTCCGCCGGGCCCCTGGGAAAGGACTTGAATGGGTGTCCGG |
| | | CATCGTGTACTCGGGTTCCACCTACTACGCGGCCTCAGTGAAG |
| | | GGCCGGTTTACTATTAGCCGCGACAACTCCAGAAACACACTG |
| | | TACCTCCAAATGAACTCGCTGCGGCCGGAAGATACCGCTATC |
| | | TACTACTGCTCCGCCCATGGGGGAGAGTCGGACGTCTGGGGA |
| | | CAGGGCACCACTGTCACTGTGTCCAGCGCTTCCGGCGGTGGT |
| | | GGAAGCGGGGGACGGGCCTCAGGAGGCGGTGGCAGCGAGAT |
| | | TGTGCTGACCCAGTCCCCCGGGACCCTGAGCCTGTCCCCGGG |
| | | AGAAAGGGCCACCCTCTCCTGTCGGGCATCCCAGTCCGTGGG |
| | | GTCTACTAACCTTGCATGGTACCAGCAGAAGCCCGGCCAGGC |
| | | CCCTCGCCTGCTGATCTACGACGCGTCCAATAGAGCCACCGG |
| | | CATCCCGGATCGCTTCAGCGGAGGCGGATCGGGCACCGACTT |
| | | CACCCTCACCATTTCAAGGCTGGAACCGGAGGACTTCGCCGT |
| | | GTACTACTGCCAGCAGTATGGTTCGTCCCCACCCTGGACGTTC |
| | | GGCCAGGGGACTAAGGTCGAGATCAAGACCACTACCCCAGCA |
| | | CCGAGGCCACCCACCCCGGCTCCTACCATCGCCTCCCAGCCTC |
| | | TGTCCCTGCGTCCGGAGGCATGTAGACCCGCAGCTGGTGGGG |
| | | CCGTGCATACCCGGGGTCTTGACTTCGCCTGCGATATCTACAT |
| | | TTGGGCCCCTCTGGCTGGTACTTGCGGGGTCCTGCTGCTTTCA |
| | | CTCGTGATCACTCTTTACTGTAAGCGCGGTCGGAAGAAGCTG |
| | | CTGTACATCTTTAAGCAACCCTTCATGAGGCCTGTGCAGACTA |
| | | CTCAAGAGGAGGACGGCTGTTCATGCCGGTTCCCAGAGGAGG |
| | | AGGAAGGCGGCTGCGAACTGCGCGTGAAATTCAGCCGCAGCG |
| | | CAGATGCTCCAGCCTACAAGCAGGGGCAGAACCAGCTCTACA |
| | | ACGAACTCAATCTTGGTCGGAGAGAGGAGTACGACGTGCTGG |
| | | ACAAGCGGAGAGGACGGGACCCAGAAATGGGCGGGAAGCCG |
| | | CGCAGAAAGAATCCCCAAGAGGGCCTGTACAACGAGCTCCAA |
| | | AAGGATAAGATGGCAGAAGCCTATAGCGAGATTGGTATGAA |
| | | AGGGGAACGCAGAAGAGGCAAAGGCCACGACGGACTGTACC |
| | | AGGGACTCAGCACCGCCACCAAGGACACCTATGACGCTCTTC |
| | | ACATGCAGGCCCTGCCGCCTCGG |

139108

| | | |
|---|---|---|
| 139108-aa | 1460 | QVQLVESGGGLVKPGGSLRLSCAASGFTFSDYYMSWIRQAPGK |
| ScFv | | GLEWVSYISSSGSTIYYADSVKGRFTISRDNAKNSLYLQMNSLRA |
| domain | | EDTAVYYCARESGDGMDVWGQGTTVTVSSASGGGGSGGRASG |
| | | GGGSDIQMTQSPSSLSASVGDRVTITCRASQSISSYLNWYQQKPG |
| | | KAPKLLIYAASSLQSGVPSRFSGSGSGTDFTLTISSLQPEDFATYY |
| | | CQQSYTLAFGQGTKVDIK |
| 139108-nt | 1461 | CAAGTGCAACTCGTGGAATCTGGTGGAGGACTCGTGAAACCT |
| ScFv | | GGAGGATCATTGAGACTGTCATGCGCGGCCTCGGGATTCACG |
| domain | | TTCTCCGATTACTACATGAGCTGGATTCGCCAGGCTCCGGGGA |
| | | AGGGACTGGAATGGGTGTCCTACATTTCCTCATCCGGCTCCAC |
| | | CATCTACTACGCGGACTCCGTGAAGGGGAGATTCACCATTAG |
| | | CCGCGATAACGCCAAGAACAGCCTGTACCTTCAGATGAACTC |
| | | CCTGCGGGCTGAAGATACTGCCGTCTACTACTGCGCAAGGGA |
| | | GAGCGGAGATGGGATGGACGTCTGGGGACAGGGTACCACTGT |
| | | GACCGTGTCGTCGGCCTCCGGCGGAGGGGGTTCGGGTGGAAG |
| | | GGCCAGCGGCGGCGGAGGCAGCGACATCCAGATGACCCAGT |
| | | CCCCCTCATCGCTGTCCGCCTCCGTGGGCGACCGCGTCACCAT |
| | | CACATGCCGGGCCTCACAGTCGATCTCCTCCTACCTCAATTGG |
| | | TATCAGCAGAAGCCCGGAAAGGCCCCTAAGCTTCTGATCTAC |
| | | GCAGCGTCCTCCCTGCAATCCGGGGTCCCATCTCGGTTCTCCG |
| | | GCTCGGGCAGCGGTACCGACTTCACTCTGACCATCTCGAGCCT |
| | | GCAGCCGGAGGACTTCGCCACTTACTACTGTCAGCAAAGCTA |
| | | CACCCTCGCGTTTGGCCAGGGCACCAAAGTGGACATCAAG |
| 139108-aa | 1462 | QVQLVESGGGLVKPGGSLRLSCAASGFTFSDYYMSWIRQAPGK |
| VH | | GLEWVSYISSSGSTIYYADSVKGRFTISRDNAKNSLYLQMNSLRA |
| | | EDTAVYYCARESGDGMDVWGQGTTVTVSS |
| 139108-aa | 1463 | DIQMTQSPSSLSASVGDRVTITCRASQSISSYLNWYQQKPGKAPK |
| VL | | LLIYAASSLQSGVPSRFSGSGSGTDFTLTISSLQPEDFATYYCQQS |
| | | YTLAFGQGTKVDIK |
| 139108-aa | 1464 | MALPVTALLLPLALLLHAARPQVQLVESGGGLVKPGGSLRLSCA |
| Full CAR | | ASGFTFSDYYMSWIRQAPGKGLEWVSYISSSGSTIYYADSVKGR |
| | | FTISRDNAKNSLYLQMNSLRAEDTAVYYCARESGDGMDVWGQ |
| | | GTTVTVSSASGGGGSGGRASGGGGSDIQMTQSPSSLSASVGDRV |
| | | TITCRASQSISSYLNWYQQKPGKAPKLLIYAASSLQSGVPSRFSGS |
| | | GSGTDFTLTISSLQPEDFATYYCQQSYTLAFGQGTKVDIKTTTPA |
| | | PRPPTPAPTIASQPLSLRPEACRPAAGGAVHTRGLDFACDIYIWAP |
| | | LAGTCGVLLLSLVITLYCKRGRKKLLYIFKQPFMRPVQTTQEED |
| | | GCSCRFPEEEEGGCELRVKFSRSADAPAYKQGQNQLYNELNLGR |
| | | REEYDVLDKRRGRDPEMGGKPRRKNPQEGLYNELQKDKMAEA |
| | | YSEIGMKGERRRGKGHDGLYQGLSTATKDTYDALHMQALPPR |
| 139108-nt | 1465 | ATGGCCCTCCCTGTCACCGCCCTGCTGCTTCCGCTGGCTCTTC |
| Full CAR | | TGCTCCACGCCGCTCGGCCCCAAGTGCAACTCGTGGAATCTG |
| | | GTGGAGGACTCGTGAAACCTGGAGGATCATTGAGACTGTCAT |
| | | GCGCGGCCTCGGGATTCACGTTCTCCGATTACTACATGAGCTG |
| | | GATTCGCCAGGCTCCGGGGAAGGGACTGGAATGGGTGTCCTA |
| | | CATTTCCTCATCCGGCTCCACCATCTACTACGCGGACTCCGTG |
| | | AAGGGGAGATTCACCATTAGCCGCGATAACGCCAAGAACAGC |
| | | CTGTACCTTCAGATGAACTCCCTGCGGGCTGAAGATACTGCC |
| | | GTCTACTACTGCGCAAGGGAGAGCGGAGATGGGATGGACGTC |
| | | TGGGGACAGGGTACCACTGTGACCGTGTCGTCGGCCTCCGGC |
| | | GGAGGGGGTTCGGGTGGAAGGGCCAGCGGCGGCGGAGGCAG |
| | | CGACATCCAGATGACCCAGTCCCCCTCATCGCTGTCCGCCTCC |
| | | GTGGGCGACCGCGTCACCATCACATGCCGGGCCTCACAGTCG |
| | | ATCTCCTCCTACCTCAATTGGTATCAGCAGAAGCCCGGAAAG |
| | | GCCCCTAAGCTTCTGATCTACGCAGCGTCCTCCCTGCAATCCG |
| | | GGGTCCCATCTCGGTTCTCCGGCTCGGGCAGCGGTACCGACTT |
| | | CACTCTGACCATCTCGAGCCTGCAGCCGGAGGACTTCGCCAC |
| | | TTACTACTGTCAGCAAAGCTACACCCTCGCGTTTGGCCAGGGC |
| | | ACCAAAGTGGACATCAAGACCACTACCCCAGCACCGAGGCCA |
| | | CCCACCCCGGCTCCTACCATCGCCTCCCAGCCTCTGTCCCTGC |
| | | GTCCGGAGGCATGTAGACCCGCAGCTGGTGGGGCCGTGCATA |
| | | CCCGGGGTCTTGACTTCGCCTGCGATATCTACATTTGGGCCCC |
| | | TCTGGCTGGTACTTGCGGGGTCCTGCTGCTTTCACTCGTGATC |
| | | ACTCTTTACTGTAAGCGCGGTCGGAAGAAGCTGCTGTACATCT |
| | | TTAAGCAACCCTTCATGAGGCCTGTGCAGACTACTCAAGAGG |
| | | AGGACGGCTGTTCATGCCGGTTCCCAGAGGAGGAGGAAGGCG |
| | | GCTGCGAACTGCGCGTGAAATTCAGCCGCAGCGCAGATGCTC |
| | | CAGCCTACAAGCAGGGGCAGAACCAGCTCTACAACGAACTCA |
| | | ATCTTGGTCGGAGAGAGGAGTACGACGTGCTGGACAAGCGGA |
| | | GAGGACGGGACCCAGAAATGGGCGGGAAGCCGCGCAGAAAG |
| | | AATCCCCAAGAGGGCCTGTACAACGAGCTCCAAAAGGATAAG |
| | | ATGGCAGAAGCCTATAGCGAGATTGGTATGAAAGGGGAACG |
| | | CAGAAGAGGCAAAGGCCACGACGGACTGTACCAGGGACTCA |
| | | GCACCGCCACCAAGGACACCTATGACGCTCTTCACATGCAGG |
| | | CCCTGCCGCCTCGG |

139110

| | | |
|---|---|---|
| 139110-aa | 1466 | QVQLVQSGGGLVKPGGSLRLSCAASGFTFSDYYMSWIRQAPGK |
| ScFv | | GLEWVSYISSSGNTIYYADSVKGRFTISRDNAKNSLYLQMNSLR |
| domain | | AEDTAVYYCARSTMVREDYWGQGTLVTVSSASGGGGSGGRAS |
| | | GGGGSDIVLTQSPLSLPVTLGQPASISCKSSESLVHNSGKTYLNW |
| | | FHQRPGQSPRRLIYEVSNRDSGVPDRFTGSGSGTDFTLKISRVEA |
| | | EDVGVYYCMQGTHWPGTFGQGTKLEIK |
| 139110-nt | 1467 | CAAGTGCAACTGGTGCAAAGCGGAGGAGGATTGGTCAAACCC |
| ScFv | | GGAGGAAGCCTGAGACTGTCATGCGCGGCCTCTGGATTCACC |
| domain | | TTCTCCGATTACTACATGTCATGGATCAGACAGGCCCCGGGG |
| | | AAGGGCCTCGAATGGGTGTCCTACATCTCGTCCTCCGGGAAC |
| | | ACCATCTACTACGCCGACAGCGTGAAGGGCCGCTTTACCATTT |
| | | CCCGCGACAACGCAAAGAACTCGCTGTACCTTCAGATGAATT |
| | | CCCTGCGGGCTGAAGATACCGCGGTGTACTATTGCGCCCGGT |
| | | CCACTATGGTCCGGGAGGACTACTGGGGACAGGGCACACTCG |
| | | TGACCGTGTCCAGCGCGAGCGGGGGTGGAGGCAGCGGTGGA |
| | | CGCGCCTCCGGCGGCGGCGGTTCAGACATCGTGCTGACTCAG |
| | | TCGCCCCTGTCGCTGCCGGTCACCCTGGGCCAACCGGCCTCAA |
| | | TTAGCTGCAAGTCCTCGGAGAGCCTGGTGCACAACTCAGGAA |
| | | AGACTTACCTGAACTGGTTCCATCAGCGGCCTGGACAGTCCC |
| | | CACGGAGGCTCATCTATGAAGTGTCCAACAGGGATTCGGGGG |
| | | TGCCCGACCGCTTCACTGGCTCCGGGTCCGGCACCGACTTCAC |
| | | CTTGAAAATCTCCAGAGTGGAAGCCGAGGACGTGGGCGTGTA |
| | | CTACTGTATGCAGGGTACCCACTGGCCTGGAACCTTTGGACA |
| | | AGGAACTAAGCTCGAGATTAAG |
| 139110-aa | 1468 | QVQLVQSGGGLVKPGGSLRLSCAASGFTFSDYYMSWIRQAPGK |
| VH | | GLEWVSYISSSGNTIYYADSVKGRFTISRDNAKNSLYLQMNSLR |
| | | AEDTAVYYCARSTMVREDYWGQGTLVTVSS |
| 139110-aa | 1469 | DIVLTQSPLSLPVTLGQPASISCKSSESLVHNSGKTYLNWFHQRP |
| VL | | GQSPRRLIYEVSNRDSGVPDRFTGSGSGTDFTLKISRVEAEDVGV |
| | | YYCMQGTHWPGTFGQGTKLEIK |
| 139110-aa | 1470 | MALPVTALLLPLALLLHAARPQVQLVQSGGGLVKPGGSLRLSCA |
| Full CAR | | ASGFTFSDYYMSWIRQAPGKGLEWVSYISSSGNTIYYADSVKGR |
| | | FTISRDNAKNSLYLQMNSLRAEDTAVYYCARSTMVREDYWGQ |
| | | GTLVTVSSASGGGGSGGRASGGGGSDIVLTQSPLSLPVTLGQPAS |
| | | ISCKSSESLVHNSGKTYLNWFHQRPGQSPRRLIYEVSNRDSGVPD |
| | | RFTGSGSGTDFTLKISRVEAEDVGVYYCMQGTHWPGTFGQGTK |
| | | LEIKTTTPAPRPPTPAPTIASQPLSLRPEACRPAAGGAVHTRGLDF |
| | | ACDIYIWAPLAGTCGVLLLSLVITLYCKRGRKKLLYIFKQPFMRP |
| | | VQTTQEEDGCSCRFPEEEEGGCELRVKFSRSADAPAYKQGQNQL |
| | | YNELNLGRREEYDVLDKRRGRDPEMGGKPRRKNPQEGLYNELQ |
| | | KDKMAEAYSEIGMKGERRRGKGHDGLYQGLSTATKDTYDALH |
| | | MQALPPR |
| 139110-nt | 1471 | ATGGCCCTCCCTGTCACCGCCCTGCTGCTTCCGCTGGCTCTTC |
| Full CAR | | TGCTCCACGCCGCTCGGCCCCAAGTGCAACTGGTGCAAAGCG |
| | | GAGGAGGATTGGTCAAACCCGGAGGAAGCCTGAGACTGTCAT |
| | | GCGCGGCCTCTGGATTCACCTTCTCCGATTACTACATGTCATG |
| | | GATCAGACAGGCCCCGGGGAAGGGCCTCGAATGGGTGTCCTA |
| | | CATCTCGTCCTCCGGGAACACCATCTACTACGCCGACAGCGT |
| | | GAAGGGCCGCTTTACCATTTCCCGCGACAACGCAAAGAACTC |
| | | GCTGTACCTTCAGATGAATTCCCTGCGGGCTGAAGATACCGC |
| | | GGTGTACTATTGCGCCCGGTCCACTATGGTCCGGGAGGACTA |
| | | CTGGGGACAGGGCACACTCGTGACCGTGTCCAGCGCGAGCGG |
| | | GGGTGGAGGCAGCGGTGGACGCGCCTCCGGCGGCGGCGGTTC |
| | | AGACATCGTGCTGACTCAGTCGCCCCTGTCGCTGCCGGTCACC |
| | | CTGGGCCAACCGGCCTCAATTAGCTGCAAGTCCTCGGAGAGC |
| | | CTGGTGCACAACTCAGGAAAGACTTACCTGAACTGGTTCCAT |
| | | CAGCGGCCTGGACAGTCCCCACGGAGGCTCATCTATGAAGTG |
| | | TCCAACAGGGATTCGGGGGTGCCCGACCGCTTCACTGGCTCC |
| | | GGGTCCGGCACCGACTTCACCTTGAAAATCTCCAGAGTGGAA |
| | | GCCGAGGACGTGGGCGTGTACTACTGTATGCAGGGTACCCAC |
| | | TGGCCTGGAACCTTTGGACAAGGAACTAAGCTCGAGATTAAG |
| | | ACCACTACCCCAGCACCGAGGCCACCCACCCCGGCTCCTACC |
| | | ATCGCCTCCCAGCCTCTGTCCCTGCGTCCGGAGGCATGTAGAC |
| | | CCGCAGCTGGTGGGGCCGTGCATACCCGGGGTCTTGACTTCG |
| | | CCTGCGATATCTACATTTGGGCCCCTCTGGCTGGTACTTGCGG |
| | | GGTCCTGCTGCTTTCACTCGTGATCACTCTTTACTGTAAGCGC |
| | | GGTCGGAAGAAGCTGCTGTACATCTTTAAGCAACCCTTCATG |
| | | AGGCCTGTGCAGACTACTCAAGAGGAGGACGGCTGTTCATGC |
| | | CGGTTCCCAGAGGAGGAGGAAGGCGGCTGCGAACTGCGCGT |
| | | GAAATTCAGCCGCAGCGCAGATGCTCCAGCCTACAAGCAGGG |
| | | GCAGAACCAGCTCTACAACGAACTCAATCTTGGTCGGAGAGA |
| | | GGAGTACGACGTGCTGGACAAGCGGAGAGGACGGGACCCAG |
| | | AAATGGGCGGGAAGCCGCGCAGAAAGAATCCCCAAGAGGGC |
| | | CTGTACAACGAGCTCCAAAAGGATAAGATGGCAGAAGCCTAT |
| | | AGCGAGATTGGTATGAAAGGGGAACGCAGAAGAGGCAAAGG |
| | | CCACGACGGACTGTACCAGGGACTCAGCACCGCCACCAAGGA |
| | | CACCTATGACGCTCTTCACATGCAGGCCCTGCCGCCTCGG |

139112

| | | |
|---|---|---|
| 139112-aa | 1472 | QVQLVESGGGLVQPGGSLRLSCAVSGFALSNHGMSWVRRAPGK |
| ScFv | | GLEWVSGIVYSGSTYYAASVKGRFTISRDNSRNTLYLQMNSLRP |
| domain | | EDTAIYYCSAHGGESDVWGQGTTVTVSSASGGGGSGGRASGGG |
| | | GSDIRLTQSPSPLSASVGDRVTITCQASEDINKFLNWYHQTPGKA |
| | | PKLLIYDASTLQTGVPSRFSGSGSGTDFTLTINSLQPEDIGTYYCQ |
| | | QYESLPLTFGGGTKVEIK |
| 139112-nt | 1473 | CAAGTGCAACTCGTGGAATCTGGTGGAGGACTCGTGCAACCC |
| ScFv | | GGTGGAAGCCTTAGGCTGTCGTGCGCCGTCAGCGGGTTTGCT |
| domain | | CTGAGCAACCATGGAATGTCCTGGGTCCGCCGGGCACCGGGA |
| | | AAAGGGCTGGAATGGGTGTCCGGCATCGTGTACAGCGGGTCA |
| | | ACCTATTACGCCGCGTCCGTGAAGGGCAGATTCACTATCTCA |
| | | AGAGACAACAGCCGGAACACCCTGTACTTGCAAATGAATTCC |
| | | CTGCGCCCCGAGGACACCGCCATCTACTACTGCTCCGCCCAC |
| | | GGAGGAGAGTCGGACGTGTGGGGCCAGGGAACGACTGTGAC |
| | | TGTGTCCAGCGCATCAGGAGGGGGTGGTTCGGGCGGCCGGGC |
| | | CTCGGGGGGAGGAGGTTCCGACATTCGGCTGACCCAGTCCCC |
| | | GTCCCCACTGTCGGCCTCCGTCGGCGACCGCGTGACCATCACT |
| | | TGTCAGGCGTCCGAGGACATTAACAAGTTCCTGAACTGGTAC |
| | | CACCAGACCCCTGGAAAGGCCCCCAAGCTGCTGATCTACGAT |
| | | GCCTCGACCCTTCAAACTGGAGTGCCTAGCCGGTTCTCCGGGT |
| | | CCGGCTCCGGCACTGATTTCACTCTGACCATCAACTCATTGCA |
| | | GCCGGAAGATATCGGGACCTACTATTGCCAGCAGTACGAATC |
| | | CCTCCCGCTCACATTCGGCGGGGGAACCAAGGTCGAGATTAAG |
| 139112-aa | 1474 | QVQLVESGGGLVQPGGSLRLSCAVSGFALSNHGMSWVRRAPGK |
| VH | | GLEWVSGIVYSGSTYYAASVKGRFTISRDNSRNTLYLQMNSLRP |
| | | EDTAIYYCSAHGGESDVWGQGTTVTVSS |
| 139112-aa | 1475 | DIRLTQSPSPLSASVGDRVTITCQASEDINKFLNWYHQTPGKAPK |
| VL | | LLIYDASTLQTGVPSRFSGSGSGTDFTLTINSLQPEDIGTYYCQQY |
| | | ESLPLTFGGGTKVEIK |
| 139112-aa | 1476 | MALPVTALLLPLALLLHAARPQVQLVESGGGLVQPGGSLRLSCA |
| Full CAR | | VSGFALSNHGMSWVRRAPGKGLEWVSGIVYSGSTYYAASVKGR |
| | | FTISRDNSRNTLYLQMNSLRPEDTAIYYCSAHGGESDVWGQGTT |
| | | VTVSSASGGGGSGGRASGGGGSDIRLTQSPSPLSASVGDRVTITC |
| | | QASEDINKFLNWYHQTPGKAPKLLIYDASTLQTGVPSRFSGSGSG |
| | | TDFTLTINSLQPEDIGTYYCQQYESLPLTFGGGTKVEIKTTTPAPR |
| | | PPTPAPTIASQPLSLRPEACRPAAGGAVHTRGLDFACDIYIWAPL |
| | | AGTCGVLLLSLVITLYCKRGRKKLLYIFKQPFMRPVQTTQEEDG |
| | | CSCRFPEEEEGGCELRVKFSRSADAPAYKQGQNQLYNELNLGRR |
| | | EEYDVLDKRRGRDPEMGGKPRRKNPQEGLYNELQKDKMAEAY |
| | | SEIGMKGERRRGKGHDGLYQGLSTATKDTYDALHMQALPPR |
| 139112-nt | 1477 | ATGGCCCTCCCTGTCACCGCCCTGCTGCTTCCGCTGGCTCTTC |
| Full CAR | | TGCTCCACGCCGCTCGGCCCCAAGTGCAACTCGTGGAATCTG |
| | | GTGGAGGACTCGTGCAACCCGGTGGAAGCCTTAGGCTGTCGT |
| | | GCGCCGTCAGCGGGTTTGCTCTGAGCAACCATGGAATGTCCT |
| | | GGGTCCGCCGGGCACCGGGAAAAGGGCTGGAATGGGTGTCC |
| | | GGCATCGTGTACAGCGGGTCAACCTATTACGCCGCGTCCGTG |
| | | AAGGGCAGATTCACTATCTCAAGAGACAACAGCCGGAACACC |
| | | CTGTACTTGCAAATGAATTCCCTGCGCCCCGAGGACACCGCC |
| | | ATCTACTACTGCTCCGCCCACGGAGGAGAGTCGGACGTGTGG |
| | | GGCCAGGGAACGACTGTGACTGTGTCCAGCGCATCAGGAGGG |
| | | GGTGGTTCGGGCGGCCGGGCCTCGGGGGGAGGAGGTTCCGAC |
| | | ATTCGGCTGACCCAGTCCCCGTCCCCACTGTCGGCCTCCGTCG |
| | | GCGACCGCGTGACCATCACTTGTCAGGCGTCCGAGGACATTA |
| | | ACAAGTTCCTGAACTGGTACCACCAGACCCCTGGAAAGGCCC |
| | | CCAAGCTGCTGATCTACGATGCCTCGACCCTTCAAACTGGAGT |
| | | GCCTAGCCGGTTCTCCGGGTCCGGCTCCGGCACTGATTTCACT |
| | | CTGACCATCAACTCATTGCAGCCGGAAGATATCGGGACCTAC |
| | | TATTGCCAGCAGTACGAATCCCTCCCGCTCACATTCGGCGGG |
| | | GGAACCAAGGTCGAGATTAAGACCACTACCCCAGCACCGAGG |
| | | CCACCCACCCCGGCTCCTACCATCGCCTCCCAGCCTCTGTCCC |
| | | TGCGTCCGGAGGCATGTAGACCCGCAGCTGGTGGGGCCGTGC |
| | | ATACCCGGGGTCTTGACTTCGCCTGCGATATCTACATTTGGGC |
| | | CCCTCTGGCTGGTACTTGCGGGGTCCTGCTGCTTTCACTCGTG |
| | | ATCACTCTTTACTGTAAGCGCGGTCGGAAGAAGCTGCTGTAC |
| | | ATCTTTAAGCAACCCTTCATGAGGCCTGTGCAGACTACTCAAG |
| | | AGGAGGACGGCTGTTCATGCCGGTTCCCAGAGGAGGAGGAA |
| | | GGCGGCTGCGAACTGCGCGTGAAATTCAGCCGCAGCGCAGAT |
| | | GCTCCAGCCTACAAGCAGGGGCAGAACCAGCTCTACAACGAA |
| | | CTCAATCTTGGTCGGAGAGAGGAGTACGACGTGCTGGACAAG |
| | | CGGAGAGGACGGGACCCAGAAATGGGCGGGAAGCCGCGCAG |
| | | AAAGAATCCCCAAGAGGGCCTGTACAACGAGCTCCAAAAGG |
| | | ATAAGATGGCAGAAGCCTATAGCGAGATTGGTATGAAAGGG |
| | | GAACGCAGAAGAGGCAAAGGCCACGACGGACTGTACCAGGG |
| | | ACTCAGCACCGCCACCAAGGACACCTATGACGCTCTTCACAT |
| | | GCAGGCCCTGCCGCCTCGG |

139113

| | | |
|---|---|---|
| 139113-aa | 1478 | EVQLVETGGGLVQPGGSLRLSCAVSGFALSNHGMSWVRRAPGK |
| ScFv | | GLEWVSGIVYSGSTYYAASVKGRFTISRDNSRNTLYLQMNSLRP |
| domain | | EDTAIYYCSAHGGESDVWGQGTTVTVSSASGGGGSGGRASGGG |
| | | GSETTLTQSPATLSVSPGERATLSCRASQSVGSNLAWYQQKPGQ |
| | | GPRLLIYGASTRATGIPARFSGSGSGTEFTLTISSLQPEDFAVYYC |
| | | QQYNDWLPVTFGQGTKVEIK |
| 139113-nt | 1480 | GAAGTGCAATTGGTGGAAACTGGAGGAGGACTTGTGCAACCT |
| ScFv | | GGAGGATCATTGCGGCTCTCATGCGCTGTCTCCGGCTTCGCCC |
| domain | | TGTCAAATCACGGGATGTCGTGGGTCAGACGGGCCCCGGGAA |
| | | AGGGTCTGGAATGGGTGTCGGGGATTGTGTACAGCGGCTCCA |
| | | CCTACTACGCCGCTTCGGTCAAGGGCCGCTTCACTATTTCACG |
| | | GGACAACAGCCGCAACACCCTCTATCTGCAAATGAACTCTCT |
| | | CCGCCCGGAGGATACCGCCATCTACTACTGCTCCGCACACGG |
| | | CGGCGAATCCGACGTGTGGGGACAGGGAACCACTGTCACCGT |
| | | GTCGTCCGCATCCGGTGGCGGAGGATCGGGTGGCCGGGCCTC |
| | | CGGGGGCGGCGGCAGCGAGACTACCCTGACCCAGTCCCCTGC |
| | | CACTCTGTCCGTGAGCCCGGGAGAGAGAGCCACCCTTAGCTG |
| | | CCGGGCCAGCCAGAGCGTGGGCTCCAACCTGGCCTGGTACCA |
| | | GCAGAAGCCAGGACAGGGTCCCAGGCTGCTGATCTACGGAGC |
| | | CTCCACTCGCGCGACCGGCATCCCCGCGAGGTTCTCCGGGTC |
| | | GGGTTCCGGGACCGAGTTCACCCTGACCATCTCCTCCCTCCAA |
| | | CCGGAGGACTTCGCGGTGTACTACTGTCAGCAGTACAACGAT |
| | | TGGCTGCCCGTGACATTTGGACAGGGGACGAAGGTGGAAATC |
| | | AAA |
| 139113-aa | 1481 | EVQLVETGGGLVQPGGSLRLSCAVSGFALSNHGMSWVRRAPGK |
| VH | | GLEWVSGIVYSGSTYYAASVKGRFTISRDNSRNTLYLQMNSLRP |
| | | EDTAIYYCSAHGGESDVWGQGTTVTVSS |
| 139113-aa | 1482 | ETTLTQSPATLSVSPGERATLSCRASQSVGSNLAWYQQKPGQGP |
| VL | | RLLIYGASTRATGIPARFSGSGSGTEFTLTISSLQPEDFAVYYCQQ |
| | | YNDWLPVTFGQGTKVEIK |
| 139113-aa | 1483 | MALPVTALLLPLALLLHAARPEVQLVETGGGLVQPGGSLRLSCA |
| Full CAR | | VSGFALSNHGMSWVRRAPGKGLEWVSGIVYSGSTYYAASVKGR |
| | | FTISRDNSRNTLYLQMNSLRPEDTAIYYCSAHGGESDVWGQGTT |
| | | VTVSSASGGGGSGGRASGGGGSETTLTQSPATLSVSPGERATLSC |
| | | RASQSVGSNLAWYQQKPGQGPRLLIYGASTRATGIPARFSGSGS |
| | | GTEFTLTISSLQPEDFAVYYCQQYNDWLPVTFGQGTKVEIKTTTP |
| | | APRPPTPAPTIASQPLSLRPEACRPAAGGAVHTRGLDFACDIYIW |
| | | APLAGTCGVLLLSLVITLYCKRGRKKLLYIFKQPFMRPVQTTQEE |
| | | DGCSCRFPEEEEGGCELRVKFSRSADAPAYKQGQNQLYNELNLG |
| | | RREEYDVLDKRRGRDPEMGGKPRRKNPQEGLYNELQKDKMAE |
| | | AYSEIGMKGERRRGKGHDGLYQGLSTATKDTYDALHMQALPPR |
| 139113-nt | 1484 | ATGGCCCTCCCTGTCACCGCCCTGCTGCTTCCGCTGGCTCTTC |
| Full CAR | | TGCTCCACGCCGCTCGGCCCGAAGTGCAATTGGTGGAAACTG |
| | | GAGGAGGACTTGTGCAACCTGGAGGATCATTGCGGCTCTCAT |
| | | GCGCTGTCTCCGGCTTCGCCCTGTCAAATCACGGGATGTCGTG |
| | | GGTCAGACGGGCCCCGGGAAAGGGTCTGGAATGGGTGTCGG |
| | | GGATTGTGTACAGCGGCTCCACCTACTACGCCGCTTCGGTCAA |
| | | GGGCCGCTTCACTATTTCACGGGACAACAGCCGCAACACCCT |
| | | CTATCTGCAAATGAACTCTCTCCGCCCGGAGGATACCGCCATC |
| | | TACTACTGCTCCGCACACGGCGGCGAATCCGACGTGTGGGGA |
| | | CAGGGAACCACTGTCACCGTGTCGTCCGCATCCGGTGGCGGA |
| | | GGATCGGGTGGCCGGGCCTCCGGGGGCGGCGGCAGCGAGAC |
| | | TACCCTGACCCAGTCCCCTGCCACTCTGTCCGTGAGCCCGGGA |
| | | GAGAGAGCCACCCTTAGCTGCCGGGCCAGCCAGAGCGTGGGC |
| | | TCCAACCTGGCCTGGTACCAGCAGAAGCCAGGACAGGGTCCC |
| | | AGGCTGCTGATCTACGGAGCCTCCACTCGCGCGACCGGCATC |
| | | CCCGCGAGGTTCTCCGGGTCGGGTTCCGGGACCGAGTTCACC |
| | | CTGACCATCTCCTCCCTCCAACCGGAGGACTTCGCGGTGTACT |
| | | ACTGTCAGCAGTACAACGATTGGCTGCCCGTGACATTTGGAC |
| | | AGGGGACGAAGGTGGAAATCAAAACCACTACCCCAGCACCG |
| | | AGGCCACCCACCCCGGCTCCTACCATCGCCTCCCAGCCTCTGT |
| | | CCCTGCGTCCGGAGGCATGTAGACCCGCAGCTGGTGGGGCCG |
| | | TGCATACCCGGGGTCTTGACTTCGCCTGCGATATCTACATTTG |
| | | GGCCCCTCTGGCTGGTACTTGCGGGGTCCTGCTGCTTTCACTC |
| | | GTGATCACTCTTTACTGTAAGCGCGGTCGGAAGAAGCTGCTG |
| | | TACATCTTTAAGCAACCCTTCATGAGGCCTGTGCAGACTACTC |
| | | AAGAGGAGGACGGCTGTTCATGCCGGTTCCCAGAGGAGGAG |
| | | GAAGGCGGCTGCGAACTGCGCGTGAAATTCAGCCGCAGCGCA |
| | | GATGCTCCAGCCTACAAGCAGGGGCAGAACCAGCTCTACAAC |
| | | GAACTCAATCTTGGTCGGAGAGAGGAGTACGACGTGCTGGAC |
| | | AAGCGGAGAGGACGGGACCCAGAAATGGGCGGGAAGCCGCG |
| | | CAGAAAGAATCCCCAAGAGGGCCTGTACAACGAGCTCCAAA |
| | | AGGATAAGATGGCAGAAGCCTATAGCGAGATTGGTATGAAA |
| | | GGGGAACGCAGAAGAGGCAAAGGCCACGACGGACTGTACCA |
| | | GGGACTCAGCACCGCCACCAAGGACACCTATGACGCTCTTCA |
| | | CATGCAGGCCCTGCCGCCTCGG |

139114

| | | |
|---|---|---|
| 139114-aa | 1485 | EVQLVESGGGLVQPGGSLRLSCAVSGFALSNHGMSWVRRAPGK |
| ScFv | | GLEWVSGIVYSGSTYYAASVKGRFTISRDNSRNTLYLQMNSLRP |
| domain | | EDTAIYYCSAHGGESDVWGQGTTVTVSSASGGGGSGGRASGGG |
| | | GSEIVLTQSPGTLSLSPGERATLSCRASQSIGSSSLAWYQQKPGQ |
| | | APRLLMYGASSRASGIPDRFSGSGSGTDFTLTISRLEPEDFAVYYC |
| | | QQYAGSPPFTFGQGTKVEIK |
| 139114-nt | 1486 | GAAGTGCAATTGGTGGAATCTGGTGGAGGACTTGTGCAACCT |
| ScFv | | GGAGGATCACTGAGACTGTCATGCGCGGTGTCCGGTTTTGCC |
| domain | | CTGAGCAATCATGGGATGTCGTGGGTCCGGCGCGCCCCCGGA |
| | | AAGGGTCTGGAATGGGTGTCGGGTATCGTCTACTCCGGGAGC |
| | | ACTTACTACGCCGCGAGCGTGAAGGGCCGCTTCACCATTTCCC |
| | | GCGATAACTCCCGCAACACCCTGTACTTGCAAATGAACTCGC |
| | | TCCGGCCTGAGGACACTGCCATCTACTACTGCTCCGCACACG |
| | | GAGGAGAATCCGACGTGTGGGGCCAGGGAACTACCGTGACC |
| | | GTCAGCAGCGCCTCCGGCGGCGGGGGCTCAGGCGGACGGGCT |
| | | AGCGGCGGCGGTGGCTCCGAGATCGTGCTGACCCAGTCGCCT |
| | | GGCACTCTCTCGCTGAGCCCCGGGGAAAGGGCAACCCTGTCC |
| | | TGTCGGGCCAGCCAGTCCATTGGATCATCCTCCCTCGCCTGGT |
| | | ATCAGCAGAAACCGGGACAGGCTCCGCGGCTGCTTATGTATG |
| | | GGGCCAGCTCAAGAGCCTCCGGCATTCCCGACCGGTTCTCCG |
| | | GGTCCGGTTCCGGCACCGATTTCACCCTGACTATCTCGAGGCT |
| | | GGAGCCAGAGGACTTCGCCGTGTACTACTGCCAGCAGTACGC |
| | | GGGGTCCCCGCCGTTCACGTTCGGACAGGGAACCAAGGTCGA |
| | | GATCAAG |
| 139114-aa | 1487 | EVQLVESGGGLVQPGGSLRLSCAVSGFALSNHGMSWVRRAPGK |
| VH | | GLEWVSGIVYSGSTYYAASVKGRFTISRDNSRNTLYLQMNSLRP |
| | | EDTAIYYCSAHGGESDVWGQGTTVTVSS |
| 139114-aa | 1488 | EIVLTQSPGTLSLSPGERATLSCRASQSIGSSSLAWYQQKPGQAPR |
| VL | | LLMYGASSRASGIPDRFSGSGSGTDFTLTISRLEPEDFAVYYCQQ |
| | | YAGSPPFTFGQGTKVEIK |
| 139114-aa | 1489 | MALPVTALLLPLALLLHAARPEVQLVESGGGLVQPGGSLRLSCA |
| Full CAR | | VSGFALSNHGMSWVRRAPGKGLEWVSGIVYSGSTYYAASVKGR |
| | | FTISRDNSRNTLYLQMNSLRPEDTAIYYCSAHGGESDVWGQGTT |
| | | VTVSSASGGGGSGGRASGGGGSEIVLTQSPGTLSLSPGERATLSC |
| | | RASQSIGSSSLAWYQQKPGQAPRLLMYGASSRASGIPDRFSGSGS |
| | | GTDFTLTISRLEPEDFAVYYCQQYAGSPPFTFGQGTKVEIKTTTP |
| | | APRPPTPAPTIASQPLSLRPEACRPAAGGAVHTRGLDFACDIYIW |
| | | APLAGTCGVLLLSLVITLYCKRGRKKLLYIFKQPFMRPVQTTQEE |
| | | DGCSCRFPEEEEGGCELRVKFSRSADAPAYKQGQNQLYNELNLG |
| | | RREEYDVLDKRRGRDPEMGGKPRRKNPQEGLYNELQKDKMAE |
| | | AYSEIGMKGERRRGKGHDGLYQGLSTATKDTYDALHMQALPPR |
| 139114-nt | 1490 | ATGGCCCTCCCTGTCACCGCCCTGCTGCTTCCGCTGGCTCTTC |
| Full CAR | | TGCTCCACGCCGCTCGGCCCGAAGTGCAATTGGTGGAATCTG |
| | | GTGGAGGACTTGTGCAACCTGGAGGATCACTGAGACTGTCAT |
| | | GCGCGGTGTCCGGTTTTGCCCTGAGCAATCATGGGATGTCGTG |
| | | GGTCCGGCGCGCCCCCGGAAAGGGTCTGGAATGGGTGTCGGG |
| | | TATCGTCTACTCCGGGAGCACTTACTACGCCGCGAGCGTGAA |
| | | GGGCCGCTTCACCATTTCCCGCGATAACTCCCGCAACACCCTG |
| | | TACTTGCAAATGAACTCGCTCCGGCCTGAGGACACTGCCATCT |
| | | ACTACTGCTCCGCACACGGAGGAGAATCCGACGTGTGGGGCC |
| | | AGGGAACTACCGTGACCGTCAGCAGCGCCTCCGGCGGCGGGG |
| | | GCTCAGGCGGACGGGCTAGCGGCGGCGGTGGCTCCGAGATCG |
| | | TGCTGACCCAGTCGCCTGGCACTCTCTCGCTGAGCCCCGGGG |
| | | AAAGGGCAACCCTGTCCTGTCGGGCCAGCCAGTCCATTGGAT |
| | | CATCCTCCCTCGCCTGGTATCAGCAGAAACCGGGACAGGCTC |
| | | CGCGGCTGCTTATGTATGGGGCCAGCTCAAGAGCCTCCGGCA |
| | | TTCCCGACCGGTTCTCCGGGTCCGGTTCCGGCACCGATTTCAC |
| | | CCTGACTATCTCGAGGCTGGAGCCAGAGGACTTCGCCGTGTA |
| | | CTACTGCCAGCAGTACGCGGGGTCCCCGCCGTTCACGTTCGG |
| | | ACAGGGAACCAAGGTCGAGATCAAGACCACTACCCCAGCACC |
| | | GAGGCCACCCACCCCGGCTCCTACCATCGCCTCCCAGCCTCTG |
| | | TCCCTGCGTCCGGAGGCATGTAGACCCGCAGCTGGTGGGGCC |
| | | GTGCATACCCGGGGTCTTGACTTCGCCTGCGATATCTACATTT |
| | | GGGCCCCTCTGGCTGGTACTTGCGGGGTCCTGCTGCTTTCACT |
| | | CGTGATCACTCTTTACTGTAAGCGCGGTCGGAAGAAGCTGCT |
| | | GTACATCTTTAAGCAACCCTTCATGAGGCCTGTGCAGACTACT |
| | | CAAGAGGAGGACGGCTGTTCATGCCGGTTCCCAGAGGAGGAG |
| | | GAAGGCGGCTGCGAACTGCGCGTGAAATTCAGCCGCAGCGCA |
| | | GATGCTCCAGCCTACAAGCAGGGGCAGAACCAGCTCTACAAC |
| | | GAACTCAATCTTGGTCGGAGAGAGGAGTACGACGTGCTGGAC |
| | | AAGCGGAGAGGACGGGACCCAGAAATGGGCGGGAAGCCGCG |
| | | CAGAAAGAATCCCCAAGAGGGCCTGTACAACGAGCTCCAAA |
| | | AGGATAAGATGGCAGAAGCCTATAGCGAGATTGGTATGAAA |
| | | GGGGAACGCAGAAGAGGCAAAGGCCACGACGGACTGTACCA |
| | | GGGACTCAGCACCGCCACCAAGGACACCTATGACGCTCTTCA |
| | | CATGCAGGCCCTGCCGCCTCGG |

149362

| | | |
|---|---|---|
| 149362-aa | 1491 | QVQLQESGPGLVKPSETLSLTCTVSGGSISSSYYYWGWIRQPPGK |
| ScFv | | GLEWIGSIYYSGSAYYNPSLKSRVTISVDTSKNQFSLRLSSVTAA |
| domain | | DTAVYYCARHWQEWPDAFDIWGQGTMVTVSSGGGGSGGGGS |
| | | GGGGSETTLTQSPAFMSATPGDKVIISCKASQDIDDAMNWYQQK |
| | | PGEAPLFIIQSATSPVPGIPPRFSGSGFGTDFSLTINNIESEDAAYYF |
| | | CLQHDNFPLTFGQGTKLEIK |
| 149362-nt | 1492 | CAAGTGCAGCTTCAGGAAAGCGGACCGGGCCTGGTCAAGCCA |
| ScFv | | TCCGAAACTCTCTCCCTGACTTGCACTGTGTCTGGCGGTTCCA |
| domain | | TCTCATCGTCGTACTACTACTGGGGCTGGATTAGGCAGCCGCC |
| | | CGGAAAGGGACTGGAGTGGATCGGAAGCATCTACTATTCCGG |
| | | CTCGGCGTACTACAACCCTAGCCTCAAGTCGAGAGTGACCAT |
| | | CTCCGTGGATACCTCCAAGAACCAGTTTTCCCTGCGCCTGAGC |
| | | TCCGTGACCGCCGCTGACACCGCCGTGTACTACTGTGCTCGGC |
| | | ATTGGCAGGAATGGCCCGATGCCTTCGACATTTGGGGCCAGG |
| | | GCACTATGGTCACTGTGTCATCCGGGGGTGGAGGCAGCGGGG |
| | | GAGGAGGGTCCGGGGGGGGAGGTTCAGAGACAACCTTGACC |
| | | CAGTCACCCGCATTCATGTCCGCCACTCCGGGAGACAAGGTC |
| | | ATCATCTCGTGCAAAGCGTCCCAGGATATCGACGATGCCATG |
| | | AATTGGTACCAGCAGAAGCCTGGCGAAGCGCCGCTGTTCATT |
| | | ATCCAATCCGCAACCTCGCCCGTGCCTGGAATCCCACCGCGG |
| | | TTCAGCGGCAGCGGTTTCGGAACCGACTTTTCCCTGACCATTA |
| | | ACAACATTGAGTCCGAGGACGCCGCCTACTACTTCTGCCTGC |
| | | AACACGACAACTTCCCTCTCACGTTCGGCCAGGGAACCAAGC |
| | | TGGAAATCAAG |
| 149362-aa | 1493 | QVQLQESGPGLVKPSETLSLTCTVSGGSISSSYYYWGWIRQPPGK |
| VH | | GLEWIGSIYYSGSAYYNPSLKSRVTISVDTSKNQFSLRLSSVTAA |
| | | DTAVYYCARHWQEWPDAFDIWGQGTMVTVSS |
| 149362-aa | 1494 | ETTLTQSPAFMSATPGDKVIISCKASQDIDDAMNWYQQKPGEAP |
| VL | | LFIIQSATSPVPGIPPRFSGSGFGTDFSLTINNIESEDAAYYFCLQH |
| | | DNFPLTFGQGTKLEIK |
| 149362-aa | 1495 | MALPVTALLLPLALLLHAARPQVQLQESGPGLVKPSETLSLTCT |
| Full CAR | | VSGGSISSSYYYWGWIRQPPGKGLEWIGSIYYSGSAYYNPSLKSR |
| | | VTISVDTSKNQFSLRLSSVTAADTAVYYCARHWQEWPDAFDIW |
| | | GQGTMVTVSSGGGGSGGGGSGGGGSETTLTQSPAFMSATPGDK |
| | | VIISCKASQDIDDAMNWYQQKPGEAPLFIIQSATSPVPGIPPRFSG |
| | | SGFGTDFSLTINNIESEDAAYYFCLQHDNFPLTFGQGTKLEIKTTT |
| | | PAPRPPTPAPTIASQPLSLRPEACRPAAGGAVHTRGLDFACDIYIW |
| | | APLAGTCGVLLLSLVITLYCKRGRKKLLYIFKQPFMRPVQTTQEE |
| | | DGCSCRFPEEEEGGCELRVKFSRSADAPAYKQGQNQLYNELNLG |
| | | RREEYDVLDKRRGRDPEMGGKPRRKNPQEGLYNELQKDKMAE |
| | | AYSEIGMKGERRRGKGHDGLYQGLSTATKDTYDALHMQALPPR |
| 149362-nt | 1496 | ATGGCCCTCCCTGTCACCGCCCTGCTGCTTCCGCTGGCTCTTC |
| Full CAR | | TGCTCCACGCCGCTCGGCCCCAAGTGCAGCTTCAGGAAAGCG |
| | | GACCGGGCCTGGTCAAGCCATCCGAAACTCTCTCCCTGACTTG |
| | | CACTGTGTCTGGCGGTTCCATCTCATCGTCGTACTACTACTGG |
| | | GGCTGGATTAGGCAGCCGCCCGGAAAGGGACTGGAGTGGATC |
| | | GGAAGCATCTACTATTCCGGCTCGGCGTACTACAACCCTAGC |
| | | CTCAAGTCGAGAGTGACCATCTCCGTGGATACCTCCAAGAAC |
| | | CAGTTTTCCCTGCGCCTGAGCTCCGTGACCGCCGCTGACACCG |
| | | CCGTGTACTACTGTGCTCGGCATTGGCAGGAATGGCCCGATG |
| | | CCTTCGACATTTGGGGCCAGGGCACTATGGTCACTGTGTCATC |
| | | CGGGGGTGGAGGCAGCGGGGGAGGAGGGTCCGGGGGGGGAG |
| | | GTTCAGAGACAACCTTGACCCAGTCACCCGCATTCATGTCCGC |
| | | CACTCCGGGAGACAAGGTCATCATCTCGTGCAAAGCGTCCCA |
| | | GGATATCGACGATGCCATGAATTGGTACCAGCAGAAGCCTGG |
| | | CGAAGCGCCGCTGTTCATTATCCAATCCGCAACCTCGCCCGTG |
| | | CCTGGAATCCCACCGCGGTTCAGCGGCAGCGGTTTCGGAACC |
| | | GACTTTTCCCTGACCATTAACAACATTGAGTCCGAGGACGCC |
| | | GCCTACTACTTCTGCCTGCAACACGACAACTTCCCTCTCACGT |
| | | TCGGCCAGGGAACCAAGCTGGAAATCAAGACCACTACCCCAG |
| | | CACCGAGGCCACCCACCCCGGCTCCTACCATCGCCTCCCAGC |
| | | CTCTGTCCCTGCGTCCGGAGGCATGTAGACCCGCAGCTGGTG |
| | | GGGCCGTGCATACCCGGGGTCTTGACTTCGCCTGCGATATCTA |
| | | CATTTGGGCCCCTCTGGCTGGTACTTGCGGGGTCCTGCTGCTT |
| | | TCACTCGTGATCACTCTTTACTGTAAGCGCGGTCGGAAGAAG |
| | | CTGCTGTACATCTTTAAGCAACCCTTCATGAGGCCTGTGCAGA |
| | | CTACTCAAGAGGAGGACGGCTGTTCATGCCGGTTCCCAGAGG |
| | | AGGAGGAAGGCGGCTGCGAACTGCGCGTGAAATTCAGCCGC |
| | | AGCGCAGATGCTCCAGCCTACAAGCAGGGGCAGAACCAGCTC |
| | | TACAACGAACTCAATCTTGGTCGGAGAGAGGAGTACGACGTG |
| | | CTGGACAAGCGGAGAGGACGGGACCCAGAAATGGGCGGGAA |
| | | GCCGCGCAGAAAGAATCCCCAAGAGGGCCTGTACAACGAGCT |
| | | CCAAAAGGATAAGATGGCAGAAGCCTATAGCGAGATTGGTAT |
| | | GAAAGGGGAACGCAGAAGAGGCAAAGGCCACGACGGACTGT |
| | | ACCAGGGACTCAGCACCGCCACCAAGGACACCTATGACGCTC |
| | | TTCACATGCAGGCCCTGCCGCCTCGG |

149363

| | | |
|---|---|---|
| 149363-aa | 1497 | VNLRESGPALVKPTQTLTLTCTFSGFSLRTSGMCVSWIRQPPGKA |
| ScFv | | LEWLARIDWDEDKFYSTSLKTRLTISKDTSDNQVVLRMTNMDP |
| domain | | ADTATYYCARSGAGGTSATAFDIWGPGTMVTVSSGGGGSGGGG |
| | | SGGGGSDIQMTQSPSSLSASVGDRVTITCRASQDIYNNLAWFQL |
| | | KPGSAPRSLMYAANKSQSGVPSRFSGSASGTDFTLTISSLQPEDF |
| | | ATYYCQHYYRFPYSFGQGTKLEIK |
| 149363-nt | 1498 | CAAGTCAATCTGCGCGAATCCGGCCCCGCCTTGGTCAAGCCT |
| ScFv | | ACCCAGACCCTCACTCTGACCTGTACTTTCTCCGGCTTCTCCC |
| domain | | TGCGGACTTCCGGGATGTGCGTGTCCTGGATCAGACAGCCTC |
| | | CGGGAAAGGCCCTGGAGTGGCTCGCTCGCATTGACTGGGATG |
| | | AGGACAAGTTCTACTCCACCTCACTCAAGACCAGGCTGACCA |
| | | TCAGCAAAGATACCTCTGACAACCAAGTGGTGCTCCGCATGA |
| | | CCAACATGGACCCAGCCGACACTGCCACTTACTACTGCGCGA |
| | | GGAGCGGAGCGGGCGGAACCTCCGCCACCGCCTTCGATATTT |
| | | GGGGCCCGGGTACCATGGTCACCGTGTCAAGCGGAGGAGGG |
| | | GGGTCCGGGGGCGGCGGTTCCGGGGGAGGCGGATCGGACATT |
| | | CAGATGACTCAGTCACCATCGTCCCTGAGCGCTAGCGTGGGC |
| | | GACAGAGTGACAATCACTTGCCGGGCATCCCAGGACATCTAT |
| | | AACAACCTTGCGTGGTTCCAGCTGAAGCCTGGTTCCGCACCG |
| | | CGGTCACTTATGTACGCCGCCAACAAGAGCCAGTCGGGAGTG |
| | | CCGTCCCGGTTTTCCGGTTCGGCCTCGGGAACTGACTTCACCC |
| | | TGACGATCTCCAGCCTGCAACCCGAGGATTTCGCCACCTACTA |
| | | CTGCCAGCACTACTACCGCTTTCCCTACTCGTTCGGACAGGGA |
| | | ACCAAGCTGGAAATCAAG |
| 149363-aa | 1499 | QVNLRESGPALVKPTQTLTLTCTFSGFSLRTSGMCVSWIRQPPGK |
| VH | | ALEWLARIDWDEDKFYSTSLKTRLTISKDTSDNQVVLRMTNMD |
| | | PADTATYYCARSGAGGTSATAFDIWGPGTMVTVSS |
| 149363-aa | 1500 | DIQMTQSPSSLSASVGDRVTITCRASQDIYNNLAWFQLKPGSAPR |
| VL | | SLMYAANKSQSGVPSRFSGSASGTDFTLTISSLQPEDFATYYCQH |
| | | YYRFPYSFGQGTKLEIK |
| 149363-aa | 1501 | MALPVTALLLPLALLLHAARPQVNLRESGPALVKPTQTLTLTCT |
| Full CAR | | FSGFSLRTSGMCVSWIRQPPGKALEWLARIDWDEDKFYSTSLKT |
| | | RLTISKDTSDNQVVLRMTNMDPADTATYYCARSGAGGTSATAF |
| | | DIWGPGTMVTVSSGGGGSGGGGSGGGGSDIQMTQSPSSLSASVG |
| | | DRVTITCRASQDIYNNLAWFQLKPGSAPRSLMYAANKSQSGVPS |
| | | RFSGSASGTDFTLTISSLQPEDFATYYCQHYYRFPYSFGQGTKLEI |
| | | KTTTPAPRPPTPAPTIASQPLSLRPEACRPAAGGAVHTRGLDFAC |
| | | DIYIWAPLAGTCGVLLLSLVITLYCKRGRKKLLYIFKQPFMRPVQ |
| | | TTQEEDGCSCRFPEEEEGGCELRVKFSRSADAPAYKQGQNQLYN |
| | | ELNLGRREEYDVLDKRRGRDPEMGGKPRRKNPQEGLYNELQKD |
| | | KMAEAYSEIGMKGERRRGKGHDGLYQGLSTATKDTYDALHMQ |
| | | ALPPR |
| 149363-nt | 1502 | ATGGCCCTCCCTGTCACCGCCCTGCTGCTTCCGCTGGCTCTTC |
| Full CAR | | TGCTCCACGCCGCTCGGCCCCAAGTCAATCTGCGCGAATCCG |
| | | GCCCCGCCTTGGTCAAGCCTACCCAGACCCTCACTCTGACCTG |
| | | TACTTTCTCCGGCTTCTCCCTGCGGACTTCCGGGATGTGCGTG |
| | | TCCTGGATCAGACAGCCTCCGGGAAAGGCCCTGGAGTGGCTC |
| | | GCTCGCATTGACTGGGATGAGGACAAGTTCTACTCCACCTCA |
| | | CTCAAGACCAGGCTGACCATCAGCAAAGATACCTCTGACAAC |
| | | CAAGTGGTGCTCCGCATGACCAACATGGACCCAGCCGACACT |
| | | GCCACTTACTACTGCGCGAGGAGCGGAGCGGGCGGAACCTCC |
| | | GCCACCGCCTTCGATATTTGGGGCCCGGGTACCATGGTCACC |
| | | GTGTCAAGCGGAGGAGGGGGGTCCGGGGGCGGCGGTTCCGG |
| | | GGGAGGCGGATCGGACATTCAGATGACTCAGTCACCATCGTC |
| | | CCTGAGCGCTAGCGTGGGCGACAGAGTGACAATCACTTGCCG |
| | | GGCATCCCAGGACATCTATAACAACCTTGCGTGGTTCCAGCT |
| | | GAAGCCTGGTTCCGCACCGCGGTCACTTATGTACGCCGCCAA |
| | | CAAGAGCCAGTCGGGAGTGCCGTCCCGGTTTTCCGGTTCGGC |
| | | CTCGGGAACTGACTTCACCCTGACGATCTCCAGCCTGCAACCC |
| | | GAGGATTTCGCCACCTACTACTGCCAGCACTACTACCGCTTTC |
| | | CCTACTCGTTCGGACAGGGAACCAAGCTGGAAATCAAGACCA |
| | | CTACCCCAGCACCGAGGCCACCCACCCCGGCTCCTACCATCG |
| | | CCTCCCAGCCTCTGTCCCTGCGTCCGGAGGCATGTAGACCCGC |
| | | AGCTGGTGGGGCCGTGCATACCCGGGGTCTTGACTTCGCCTG |
| | | CGATATCTACATTTGGGCCCCTCTGGCTGGTACTTGCGGGGTC |
| | | CTGCTGCTTTCACTCGTGATCACTCTTTACTGTAAGCGCGGTC |
| | | GGAAGAAGCTGCTGTACATCTTTAAGCAACCCTTCATGAGGC |
| | | CTGTGCAGACTACTCAAGAGGAGGACGGCTGTTCATGCCGGT |
| | | TCCCAGAGGAGGAGGAAGGCGGCTGCGAACTGCGCGTGAAA |
| | | TTCAGCCGCAGCGCAGATGCTCCAGCCTACAAGCAGGGGCAG |
| | | AACCAGCTCTACAACGAACTCAATCTTGGTCGGAGAGAGGAG |
| | | TACGACGTGCTGGACAAGCGGAGAGGACGGGACCCAGAAAT |
| | | GGGCGGGAAGCCGCGCAGAAAGAATCCCCAAGAGGGCCTGT |
| | | ACAACGAGCTCCAAAAGGATAAGATGGCAGAAGCCTATAGC |
| | | GAGATTGGTATGAAAGGGGAACGCAGAAGAGGCAAAGGCCA |
| | | CGACGGACTGTACCAGGGACTCAGCACCGCCACCAAGGACAC |
| | | CTATGACGCTCTTCACATGCAGGCCCTGCCGCCTCGG |

149364

| | | |
|---|---|---|
| 149364-aa | 1503 | EVQLVESGGGLVKPGGSLRLSCAASGFTFSSYSMNWVRQAPGK |
| ScFv | | GLEWVSSISSSSSYIYYADSVKGRFTISRDNAKNSLYLQMNSLRA |
| domain | | EDTAVYYCAKTIAAVYAFDIWGQGTTVTVSSGGGGSGGGGSGG |
| | | GGSEIVLTQSPLSLPVTPEEPASISCRSSQSLLHSNGYNYLDWYLQ |
| | | KPGQSPQLLIYLGSNRASGVPDRFSGSGSGTDFTLKISRVEAEDV |
| | | GVYYCMQALQTPYTFGQGTKLEIK |
| 149364-nt | 1504 | GAAGTGCAGCTTGTCGAATCCGGGGGGGGACTGGTCAAGCCG |
| ScFv | | GGCGGATCACTGAGACTGTCCTGCGCCGCGAGCGGCTTCACG |
| domain | | TTCTCCTCCTACTCCATGAACTGGGTCCGCCAAGCCCCCGGGA |
| | | AGGGACTGGAATGGGTGTCCTCTATCTCCTCGTCGTCGTCCTA |
| | | CATCTACTACGCCGACTCCGTGAAGGGAAGATTCACCATTTCC |
| | | CGCGACAACGCAAAGAACTCACTGTACTTGCAAATGAACTCA |
| | | CTCCGGGCCGAAGATACTGCTGTGTACTATTGCGCCAAGACT |
| | | ATTGCCGCCGTCTACGCTTTCGACATCTGGGGCCAGGGAACC |
| | | ACCGTGACTGTGTCGTCCGGTGGTGGTGGCTCGGGCGGAGGA |
| | | GGAAGCGGCGGCGGGGGGTCCGAGATTGTGCTGACCCAGTCG |
| | | CCACTGAGCCTCCCTGTGACCCCCGAGGAACCCGCCAGCATC |
| | | AGCTGCCGGTCCAGCCAGTCCCTGCTCCACTCCAACGGATAC |
| | | AATTACCTCGATTGGTACCTTCAGAAGCCTGGACAAAGCCCG |
| | | CAGCTGCTCATCTACTTGGGATCAAACCGCGCGTCAGGAGTG |
| | | CCTGACCGGTTCTCCGGCTCGGGCAGCGGTACCGATTTCACCC |
| | | TGAAAATCTCCAGGGTGGAGGCAGAGGACGTGGGAGTGTATT |
| | | ACTGTATGCAGGCGCTGCAGACTCCGTACACATTTGGGCAGG |
| | | GCACCAAGCTGGAGATCAAG |
| 149364-aa | 1505 | EVQLVESGGGLVKPGGSLRLSCAASGFTFSSYSMNWVRQAPGK |
| VH | | GLEWVSSISSSSSYIYYADSVKGRFTISRDNAKNSLYLQMNSLRA |
| | | EDTAVYYCAKTIAAVYAFDIWGQGTTVTVSS |
| 149364-aa | 1506 | EIVLTQSPLSLPVTPEEPASISCRSSQSLLHSNGYNYLDWYLQKPG |
| VL | | QSPQLLIYLGSNRASGVPDRFSGSGSGTDFTLKISRVEAEDVGVY |
| | | YCMQALQTPYTFGQGTKLEIK |
| 149364-aa | 1507 | MALPVTALLLPLALLLHAARPEVQLVESGGGLVKPGGSLRLSCA |
| Full CAR | | ASGFTFSSYSMNWVRQAPGKGLEWVSSISSSSSYIYYADSVKGR |
| | | FTISRDNAKNSLYLQMNSLRAEDTAVYYCAKTIAAVYAFDIWG |
| | | QGTTVTVSSGGGGSGGGGSGGGGSEIVLTQSPLSLPVTPEEPASIS |
| | | CRSSQSLLHSNGYNYLDWYLQKPGQSPQLLIYLGSNRASGVPDR |
| | | FSGSGSGTDFTLKISRVEAEDVGVYYCMQALQTPYTFGQGTKLE |
| | | IKTTTPAPRPPTPAPTIASQPLSLRPEACRPAAGGAVHTRGLDFAC |
| | | DIYIWAPLAGTCGVLLLSLVITLYCKRGRKKLLYIFKQPFMRPVQ |
| | | TTQEEDGCSCRFPEEEEGGCELRVKFSRSADAPAYKQGQNQLYN |
| | | ELNLGRREEYDVLDKRRGRDPEMGGKPRRKNPQEGLYNELQKD |
| | | KMAEAYSEIGMKGERRRGKGHDGLYQGLSTATKDTYDALHMQ |
| | | ALPPR |
| 149364-nt | 1508 | ATGGCCCTCCCTGTCACCGCCCTGCTGCTTCCGCTGGCTCTTC |
| Full CAR | | TGCTCCACGCCGCTCGGCCCGAAGTGCAGCTTGTCGAATCCG |
| | | GGGGGGGACTGGTCAAGCCGGGCGGATCACTGAGACTGTCCT |
| | | GCGCCGCGAGCGGCTTCACGTTCTCCTCCTACTCCATGAACTG |
| | | GGTCCGCCAAGCCCCCGGGAAGGGACTGGAATGGGTGTCCTC |
| | | TATCTCCTCGTCGTCGTCCTACATCTACTACGCCGACTCCGTG |
| | | AAGGGAAGATTCACCATTTCCCGCGACAACGCAAAGAACTCA |
| | | CTGTACTTGCAAATGAACTCACTCCGGGCCGAAGATACTGCT |
| | | GTGTACTATTGCGCCAAGACTATTGCCGCCGTCTACGCTTTCG |
| | | ACATCTGGGGCCAGGGAACCACCGTGACTGTGTCGTCCGGTG |
| | | GTGGTGGCTCGGGCGGAGGAGGAAGCGGCGGCGGGGGGTCC |
| | | GAGATTGTGCTGACCCAGTCGCCACTGAGCCTCCCTGTGACCC |
| | | CCGAGGAACCCGCCAGCATCAGCTGCCGGTCCAGCCAGTCCC |
| | | TGCTCCACTCCAACGGATACAATTACCTCGATTGGTACCTTCA |
| | | GAAGCCTGGACAAAGCCCGCAGCTGCTCATCTACTTGGGATC |
| | | AAACCGCGCGTCAGGAGTGCCTGACCGGTTCTCCGGCTCGGG |
| | | CAGCGGTACCGATTTCACCCTGAAAATCTCCAGGGTGGAGGC |
| | | AGAGGACGTGGGAGTGTATTACTGTATGCAGGCGCTGCAGAC |
| | | TCCGTACACATTTGGGCAGGGCACCAAGCTGGAGATCAAGAC |
| | | CACTACCCCAGCACCGAGGCCACCCACCCCGGCTCCTACCAT |
| | | CGCCTCCCAGCCTCTGTCCCTGCGTCCGGAGGCATGTAGACCC |
| | | GCAGCTGGTGGGGCCGTGCATACCCGGGGTCTTGACTTCGCC |
| | | TGCGATATCTACATTTGGGCCCCTCTGGCTGGTACTTGCGGGG |
| | | TCCTGCTGCTTTCACTCGTGATCACTCTTTACTGTAAGCGCGG |
| | | TCGGAAGAAGCTGCTGTACATCTTTAAGCAACCCTTCATGAG |
| | | GCCTGTGCAGACTACTCAAGAGGAGGACGGCTGTTCATGCCG |
| | | GTTCCCAGAGGAGGAGGAAGGCGGCTGCGAACTGCGCGTGA |
| | | AATTCAGCCGCAGCGCAGATGCTCCAGCCTACAAGCAGGGGC |
| | | AGAACCAGCTCTACAACGAACTCAATCTTGGTCGGAGAGAGG |
| | | AGTACGACGTGCTGGACAAGCGGAGAGGACGGGACCCAGAA |
| | | ATGGGCGGGAAGCCGCGCAGAAAGAATCCCCAAGAGGGCCT |
| | | GTACAACGAGCTCCAAAAGGATAAGATGGCAGAAGCCTATA |
| | | GCGAGATTGGTATGAAAGGGGAACGCAGAAGAGGCAAAGGC |
| | | CACGACGGACTGTACCAGGGACTCAGCACCGCCACCAAGGAC |
| | | ACCTATGACGCTCTTCACATGCAGGCCCTGCCGCCTCGG |

149365

| | | |
|---|---|---|
| 149365-aa | 1509 | EVQLVESGGGLVKPGGSLRLSCAASGFTFSDYYMSWIRQAPGKG |
| ScFv | | LEWVSYISSSGSTIYYADSVKGRFTISRDNAKNSLYLQMNSLRAE |
| domain | | DTAVYYCARDLRGAFDIWGQGTMVTVSSGGGGSGGGGSGGGG |
| | | SSYVLTQSPSVSAAPGYTATISCGGNNIGTKSVHWYQQKPGQAP |
| | | LLVIRDDSVRPSKIPGRFSGSNSGNMATLTISGVQAGDEADFYCQ |
| | | VWDSDSEHVVFGGGTKLTVL |
| 149365-nt | 1510 | GAAGTCCAGCTCGTGGAGTCCGGCGGAGGCCTTGTGAAGCCT |
| ScFv | | GGAGGTTCGCTGAGACTGTCCTGCGCCGCCTCCGGCTTCACCT |
| domain | | TCTCCGACTACTACATGTCCTGGATCAGACAGGCCCCGGGAA |
| | | AGGGCCTGGAATGGGTGTCCTACATCTCGTCATCGGGCAGCA |
| | | CTATCTACTACGCGGACTCAGTGAAGGGGCGGTTCACCATTTC |
| | | CCGGGATAACGCGAAGAACTCGCTGTATCTGCAAATGAACTC |
| | | ACTGAGGGCCGAGGACACCGCCGTGTACTACTGCGCCCGCGA |
| | | TCTCCGCGGGGCATTTGACATCTGGGGACAGGGAACCATGGT |
| | | CACAGTGTCCAGCGGAGGGGGAGGATCGGGTGGCGGAGGTT |
| | | CCGGGGGTGGAGGCTCCTCCTACGTGCTGACTCAGAGCCCAA |
| | | GCGTCAGCGCTGCGCCCGGTTACACGGCAACCATCTCCTGTG |
| | | GCGGAAACAACATTGGGACCAAGTCTGTGCACTGGTATCAGC |
| | | AGAAGCCGGGCCAAGCTCCCCTGTTGGTGATCCGCGATGACT |
| | | CCGTGCGGCCTAGCAAAATTCCGGGACGGTTCTCCGGCTCCA |
| | | ACAGCGGCAATATGGCCACTCTCACCATCTCGGGAGTGCAGG |
| | | CCGGAGATGAAGCCGACTTCTACTGCCAAGTCTGGGACTCAG |
| | | ACTCCGAGCATGTGGTGTTCGGGGGCGGAACCAAGCTGACTG |
| | | TGCTC |
| 149365-aa | 1511 | EVQLVESGGGLVKPGGSLRLSCAASGFTFSDYYMSWIRQAPGKG |
| VH | | LEWVSYISSSGSTIYYADSVKGRFTISRDNAKNSLYLQMNSLRAE |
| | | DTAVYYCARDLRGAFDIWGQGTMVTVSS |
| 149365-aa | 1512 | SYVLTQSPSVSAAPGYTATISCGGNNIGTKSVHWYQQKPGQAPL |
| VL | | LVIRDDSVRPSKIPGRFSGSNSGNMATLTISGVQAGDEADFYCQV |
| | | WDSDSEHVVFGGGTKLTVL |
| 149365-aa | 1513 | MALPVTALLLPLALLLHAARPEVQLVESGGGLVKPGGSLRLSCA |
| Full CAR | | ASGFTFSDYYMSWIRQAPGKGLEWVSYISSSGSTIYYADSVKGR |
| | | FTISRDNAKNSLYLQMNSLRAEDTAVYYCARDLRGAFDIWGQG |
| | | TMVTVSSGGGGSGGGGSGGGGSSYVLTQSPSVSAAPGYTATISC |
| | | GGNNIGTKSVHWYQQKPGQAPLLVIRDDSVRPSKIPGRFSGSNS |
| | | GNMATLTISGVQAGDEADFYCQVWDSDSEHVVFGGGTKLTVLT |
| | | TTPAPRPPTPAPTIASQPLSLRPEACRPAAGGAVHTRGLDFACDIY |
| | | IWAPLAGTCGVLLLSLVITLYCKRGRKKLLYIFKQPFMRPVQTTQ |
| | | EEDGCSCRFPEEEEGGCELRVKFSRSADAPAYKQGQNQLYNELN |
| | | LGRREEYDVLDKRRGRDPEMGGKPRRKNPQEGLYNELQKDKM |
| | | AEAYSEIGMKGERRRGKGHDGLYQGLSTATKDTYDALHMQAL |
| | | PPR |
| 149365-nt | 1514 | ATGGCCCTCCCTGTCACCGCCCTGCTGCTTCCGCTGGCTCTTC |
| Full CAR | | TGCTCCACGCCGCTCGGCCCGAAGTCCAGCTCGTGGAGTCCG |
| | | GCGGAGGCCTTGTGAAGCCTGGAGGTTCGCTGAGACTGTCCT |
| | | GCGCCGCCTCCGGCTTCACCTTCTCCGACTACTACATGTCCTG |
| | | GATCAGACAGGCCCCGGGAAAGGGCCTGGAATGGGTGTCCTA |
| | | CATCTCGTCATCGGGCAGCACTATCTACTACGCGGACTCAGTG |
| | | AAGGGGCGGTTCACCATTTCCCGGGATAACGCGAAGAACTCG |
| | | CTGTATCTGCAAATGAACTCACTGAGGGCCGAGGACACCGCC |
| | | GTGTACTACTGCGCCCGCGATCTCCGCGGGGCATTTGACATCT |
| | | GGGGACAGGGAACCATGGTCACAGTGTCCAGCGGAGGGGGA |
| | | GGATCGGGTGGCGGAGGTTCCGGGGGTGGAGGCTCCTCCTAC |
| | | GTGCTGACTCAGAGCCCAAGCGTCAGCGCTGCGCCCGGTTAC |
| | | ACGGCAACCATCTCCTGTGGCGGAAACAACATTGGGACCAAG |
| | | TCTGTGCACTGGTATCAGCAGAAGCCGGGCCAAGCTCCCCTG |
| | | TTGGTGATCCGCGATGACTCCGTGCGGCCTAGCAAAATTCCG |
| | | GGACGGTTCTCCGGCTCCAACAGCGGCAATATGGCCACTCTC |
| | | ACCATCTCGGGAGTGCAGGCCGGAGATGAAGCCGACTTCTAC |
| | | TGCCAAGTCTGGGACTCAGACTCCGAGCATGTGGTGTTCGGG |
| | | GGCGGAACCAAGCTGACTGTGCTCACCACTACCCCAGCACCG |
| | | AGGCCACCCACCCCGGCTCCTACCATCGCCTCCCAGCCTCTGT |
| | | CCCTGCGTCCGGAGGCATGTAGACCCGCAGCTGGTGGGGCCG |
| | | TGCATACCCGGGGTCTTGACTTCGCCTGCGATATCTACATTTG |
| | | GGCCCCTCTGGCTGGTACTTGCGGGGTCCTGCTGCTTTCACTC |
| | | GTGATCACTCTTTACTGTAAGCGCGGTCGGAAGAAGCTGCTG |
| | | TACATCTTTAAGCAACCCTTCATGAGGCCTGTGCAGACTACTC |
| | | AAGAGGAGGACGGCTGTTCATGCCGGTTCCCAGAGGAGGAG |
| | | GAAGGCGGCTGCGAACTGCGCGTGAAATTCAGCCGCAGCGCA |
| | | GATGCTCCAGCCTACAAGCAGGGGCAGAACCAGCTCTACAAC |
| | | GAACTCAATCTTGGTCGGAGAGAGGAGTACGACGTGCTGGAC |
| | | AAGCGGAGAGGACGGGACCCAGAAATGGGCGGGAAGCCGCG |
| | | CAGAAAGAATCCCCAAGAGGGCCTGTACAACGAGCTCCAAA |
| | | AGGATAAGATGGCAGAAGCCTATAGCGAGATTGGTATGAAA |
| | | GGGGAACGCAGAAGAGGCAAAGGCCACGACGGACTGTACCA |
| | | GGGACTCAGCACCGCCACCAAGGACACCTATGACGCTCTTCA |
| | | CATGCAGGCCCTGCCGCCTCGG |

149366

| | | |
|---|---|---|
| 149366-aa | 1515 | QVQLVQSGAEVKKPGASVKVSCKPSGYTVTSHYIHWVRRAPGQ |
| ScFv | | GLEWMGMINPSGGVTAYSQTLQGRVTMTSDTSSSTVYMELSSL |
| domain | | RSEDTAMYYCAREGSGSGWYFDFWGRGTLVTVSSGGGGSGGG |
| | | GSGGGGSSYVLTQPPSVSVSPGQTASITCSGDGLSKKYVSWYQQ |
| | | KAGQSPVVLISRDKERPSGIPDRFSGSNSADTATLTISGTQAMDE |
| | | ADYYCQAWDDTTVVFGGGTKLTVL |
| 149366-nt | 1516 | CAAGTGCAGCTGGTGCAGAGCGGGGCCGAAGTCAAGAAGCC |
| ScFv | | GGGAGCCTCCGTGAAAGTGTCCTGCAAGCCTTCGGGATACAC |
| domain | | CGTGACCTCCCACTACATTCATTGGGTCCGCCGCGCCCCCGGC |
| | | CAAGGACTCGAGTGGATGGGCATGATCAACCCTAGCGGCGGA |
| | | GTGACCGCGTACAGCCAGACGCTGCAGGGACGCGTGACTATG |
| | | ACCTCGGATACCTCCTCCTCCACCGTCTATATGGAACTGTCCA |
| | | GCCTGCGGTCCGAGGATACCGCCATGTACTACTGCGCCCGGG |
| | | AAGGATCAGGCTCCGGGTGGTATTTCGACTTCTGGGGAAGAG |
| | | GCACCCTCGTGACTGTGTCATCTGGGGGAGGGGGTTCCGGTG |
| | | GTGGCGGATCGGGAGGAGGCGGTTCATCCTACGTGCTGACCC |
| | | AGCCACCCTCCGTGTCCGTGAGCCCCGGCCAGACTGCATCGA |
| | | TTACATGTAGCGGCGACGGCCTCTCCAAGAAATACGTGTCGT |
| | | GGTACCAGCAGAAGGCCGGACAGAGCCCGGTGGTGCTGATCT |
| | | CAAGAGATAAGGAGCGGCCTAGCGGAATCCCGGACAGGTTCT |
| | | CGGGTTCCAACTCCGCGGACACTGCTACTCTGACCATCTCGGG |
| | | GACCCAGGCTATGGACGAAGCCGATTACTACTGCCAAGCCTG |
| | | GGACGACACTACTGTCGTGTTTGGAGGGGGCACCAAGTTGAC |
| | | CGTCCTT |
| 149366-aa | 1517 | QVQLVQSGAEVKKPGASVKVSCKPSGYTVTSHYIHWVRRAPGQ |
| VH | | GLEWMGMINPSGGVTAYSQTLQGRVTMTSDTSSSTVYMELSSL |
| | | RSEDTAMYYCAREGSGSGWYFDFWGRGTLVTVSS |
| 149366-aa | 1518 | SYVLTQPPSVSVSPGQTASITCSGDGLSKKYVSWYQQKAGQSPV |
| VL | | VLISRDKERPSGIPDRFSGSNSADTATLTISGTQAMDEADYYCQA |
| | | WDDTTVVFGGGTKLTVL |
| 149366-aa | 1519 | MALPVTALLLPLALLLHAARPQVQLVQSGAEVKKPGASVKVSC |
| Full CAR | | KPSGYTVTSHYIHWVRRAPGQGLEWMGMINPSGGVTAYSQTLQ |
| | | GRVTMTSDTSSSTVYMELSSLRSEDTAMYYCAREGSGSGWYFD |
| | | FWGRGTLVTVSSGGGGSGGGGSGGGGSSYVLTQPPSVSVSPGQT |
| | | ASITCSGDGLSKKYVSWYQQKAGQSPVVLISRDKERPSGIPDRFS |
| | | GSNSADTATLTISGTQAMDEADYYCQAWDDTTVVFGGGTKLTV |
| | | LTTTPAPRPPTPAPTIASQPLSLRPEACRPAAGGAVHTRGLDFAC |
| | | DIYIWAPLAGTCGVLLLSLVITLYCKRGRKKLLYIFKQPFMRPVQ |
| | | TTQEEDGCSCRFPEEEEGGCELRVKFSRSADAPAYKQGQNQLYN |
| | | ELNLGRREEYDVLDKRRGRDPEMGGKPRRKNPQEGLYNELQKD |
| | | KMAEAYSEIGMKGERRRGKGHDGLYQGLSTATKDTYDALHMQ |
| | | ALPPR |
| 149366-nt | 1520 | ATGGCCCTCCCTGTCACCGCCCTGCTGCTTCCGCTGGCTCTTC |
| Full CAR | | TGCTCCACGCCGCTCGGCCCCAAGTGCAGCTGGTGCAGAGCG |
| | | GGGCCGAAGTCAAGAAGCCGGGAGCCTCCGTGAAAGTGTCCT |
| | | GCAAGCCTTCGGGATACACCGTGACCTCCCACTACATTCATTG |
| | | GGTCCGCCGCGCCCCCGGCCAAGGACTCGAGTGGATGGGCAT |
| | | GATCAACCCTAGCGGCGGAGTGACCGCGTACAGCCAGACGCT |
| | | GCAGGGACGCGTGACTATGACCTCGGATACCTCCTCCTCCAC |
| | | CGTCTATATGGAACTGTCCAGCCTGCGGTCCGAGGATACCGC |
| | | CATGTACTACTGCGCCCGGGAAGGATCAGGCTCCGGGTGGTA |
| | | TTTCGACTTCTGGGGAAGAGGCACCCTCGTGACTGTGTCATCT |
| | | GGGGGAGGGGGTTCCGGTGGTGGCGGATCGGGAGGAGGCGG |
| | | TTCATCCTACGTGCTGACCCAGCCACCCTCCGTGTCCGTGAGC |
| | | CCCGGCCAGACTGCATCGATTACATGTAGCGGCGACGGCCTC |
| | | TCCAAGAAATACGTGTCGTGGTACCAGCAGAAGGCCGGACAG |
| | | AGCCCGGTGGTGCTGATCTCAAGAGATAAGGAGCGGCCTAGC |
| | | GGAATCCCGGACAGGTTCTCGGGTTCCAACTCCGCGGACACT |
| | | GCTACTCTGACCATCTCGGGGACCCAGGCTATGGACGAAGCC |
| | | GATTACTACTGCCAAGCCTGGGACGACACTACTGTCGTGTTTG |
| | | GAGGGGGCACCAAGTTGACCGTCCTTACCACTACCCCAGCAC |
| | | CGAGGCCACCCACCCCGGCTCCTACCATCGCCTCCCAGCCTCT |
| | | GTCCCTGCGTCCGGAGGCATGTAGACCCGCAGCTGGTGGGGC |
| | | CGTGCATACCCGGGGTCTTGACTTCGCCTGCGATATCTACATT |
| | | TGGGCCCCTCTGGCTGGTACTTGCGGGGTCCTGCTGCTTTCAC |
| | | TCGTGATCACTCTTTACTGTAAGCGCGGTCGGAAGAAGCTGCT |
| | | GTACATCTTTAAGCAACCCTTCATGAGGCCTGTGCAGACTACT |
| | | CAAGAGGAGGACGGCTGTTCATGCCGGTTCCCAGAGGAGGAG |
| | | GAAGGCGGCTGCGAACTGCGCGTGAAATTCAGCCGCAGCGCA |
| | | GATGCTCCAGCCTACAAGCAGGGGCAGAACCAGCTCTACAAC |
| | | GAACTCAATCTTGGTCGGAGAGAGGAGTACGACGTGCTGGAC |
| | | AAGCGGAGAGGACGGGACCCAGAAATGGGCGGGAAGCCGCG |
| | | CAGAAAGAATCCCCAAGAGGGCCTGTACAACGAGCTCCAAA |
| | | AGGATAAGATGGCAGAAGCCTATAGCGAGATTGGTATGAAA |
| | | GGGGAACGCAGAAGAGGCAAAGGCCACGACGGACTGTACCA |
| | | GGGACTCAGCACCGCCACCAAGGACACCTATGACGCTCTTCA |
| | | CATGCAGGCCCTGCCGCCTCGG |

149367

| | | |
|---|---|---|
| 149367-aa | 1521 | QVQLQESGPGLVKPSQTLSLTCTVSGGSISSGGYYWSWIRQHPG |
| ScFv | | KGLEWIGYIYYSGSTYYNPSLKSRVTISVDTSKNQFSLKLSSVTA |
| domain | | ADTAVYYCARAGIAARLRGAFDIWGQGTMVTVSSGGGGSGGG |
| | | GSGGGGSDIVMTQSPSSVSASVGDRVIITCRASQGIRNWLAWYQ |
| | | QKPGKAPNLLIYAASNLQSGVPSRFSGSGSGADFTLTISSLQPEDV |
| | | ATYYCQKYNSAPFTFGPGTKVDIK |
| 149367-nt | 1522 | CAAGTGCAGCTTCAGGAGAGCGGCCCGGGACTCGTGAAGCCG |
| ScFv | | TCCCAGACCCTGTCCCTGACTTGCACCGTGTCGGGAGGAAGC |
| domain | | ATCTCGAGCGGAGGCTACTATTGGTCGTGGATTCGGCAGCAC |
| | | CCTGGAAAGGGCCTGGAATGGATCGGCTACATCTACTACTCC |
| | | GGCTCGACCTACTACAACCCATCGCTGAAGTCCAGAGTGACA |
| | | ATCTCAGTGGACACGTCCAAGAATCAGTTCAGCCTGAAGCTC |
| | | TCTTCCGTGACTGCGGCCGACACCGCCGTGTACTACTGCGCAC |
| | | GCGCTGGAATTGCCGCCCGGCTGAGGGGTGCCTTCGACATTT |
| | | GGGGACAGGGCACCATGGTCACCGTGTCCTCCGGCGGCGGAG |
| | | GTTCCGGGGGTGGAGGCTCAGGAGGAGGGGGGTCCGACATC |
| | | GTCATGACTCAGTCGCCCTCAAGCGTCAGCGCGTCCGTCGGG |
| | | GACAGAGTGATCATCACCTGTCGGGCGTCCCAGGGAATTCGC |
| | | AACTGGCTGGCCTGGTATCAGCAGAAGCCCGGAAAGGCCCCC |
| | | AACCTGTTGATCTACGCCGCCTCAAACCTCCAATCCGGGGTGC |
| | | CGAGCCGCTTCAGCGGCTCCGGTTCGGGTGCCGATTTCACTCT |
| | | GACCATCTCCTCCCTGCAACCTGAAGATGTGGCTACCTACTAC |
| | | TGCCAAAAGTACAACTCCGCACCTTTTACTTTCGGACCGGGG |
| | | ACCAAAGTGGACATTAAG |
| 149367-aa | 1523 | QVQLQESGPGLVKPSQTLSLTCTVSGGSISSGGYYWSWIRQHPG |
| VH | | KGLEWIGYIYYSGSTYYNPSLKSRVTISVDTSKNQFSLKLSSVTA |
| | | ADTAVYYCARAGIAARLRGAFDIWGQGTMVTVSS |
| 149367-aa | 1524 | DIVMTQSPSSVSASVGDRVIITCRASQGIRNWLAWYQQKPGKAP |
| VL | | NLLIYAASNLQSGVPSRFSGSGSGADFTLTISSLQPEDVATYYCQ |
| | | KYNSAPFTFGPGTKVDIK |
| 149367-aa | 1525 | MALPVTALLLPLALLLHAARPQVQLQESGPGLVKPSQTLSLTCT |
| Full CAR | | VSGGSISSGGYYWSWIRQHPGKGLEWIGYIYYSGSTYYNPSLKS |
| | | RVTISVDTSKNQFSLKLSSVTAADTAVYYCARAGIAARLRGAFDI |
| | | WGQGTMVTVSSGGGGSGGGGSGGGGSDIVMTQSPSSVSASVGD |
| | | RVIITCRASQGIRNWLAWYQQKPGKAPNLLIYAASNLQSGVPSR |
| | | FSGSGSGADFTLTISSLQPEDVATYYCQKYNSAPFTFGPGTKVDI |
| | | KTTTPAPRPPTPAPTIASQPLSLRPEACRPAAGGAVHTRGLDFAC |
| | | DIYIWAPLAGTCGVLLLSLVITLYCKRGRKKLLYIFKQPFMRPVQ |
| | | TTQEEDGCSCRFPEEEEGGCELRVKFSRSADAPAYKQGQNQLYN |
| | | ELNLGRREEYDVLDKRRGRDPEMGGKPRRKNPQEGLYNELQKD |
| | | KMAEAYSEIGMKGERRRGKGHDGLYQGLSTATKDTYDALHMQ |
| | | ALPPR |
| 149367-nt | 1526 | ATGGCCCTCCCTGTCACCGCCCTGCTGCTTCCGCTGGCTCTTC |
| Full CAR | | TGCTCCACGCCGCTCGGCCCCAAGTGCAGCTTCAGGAGAGCG |
| | | GCCCGGGACTCGTGAAGCCGTCCCAGACCCTGTCCCTGACTT |
| | | GCACCGTGTCGGGAGGAAGCATCTCGAGCGGAGGCTACTATT |
| | | GGTCGTGGATTCGGCAGCACCCTGGAAAGGGCCTGGAATGGA |
| | | TCGGCTACATCTACTACTCCGGCTCGACCTACTACAACCCATC |
| | | GCTGAAGTCCAGAGTGACAATCTCAGTGGACACGTCCAAGAA |
| | | TCAGTTCAGCCTGAAGCTCTCTTCCGTGACTGCGGCCGACACC |
| | | GCCGTGTACTACTGCGCACGCGCTGGAATTGCCGCCCGGCTG |
| | | AGGGGTGCCTTCGACATTTGGGGACAGGGCACCATGGTCACC |
| | | GTGTCCTCCGGCGGCGGAGGTTCCGGGGGTGGAGGCTCAGGA |
| | | GGAGGGGGGTCCGACATCGTCATGACTCAGTCGCCCTCAAGC |
| | | GTCAGCGCGTCCGTCGGGGACAGAGTGATCATCACCTGTCGG |
| | | GCGTCCCAGGGAATTCGCAACTGGCTGGCCTGGTATCAGCAG |
| | | AAGCCCGGAAAGGCCCCCAACCTGTTGATCTACGCCGCCTCA |
| | | AACCTCCAATCCGGGGTGCCGAGCCGCTTCAGCGGCTCCGGT |
| | | TCGGGTGCCGATTTCACTCTGACCATCTCCTCCCTGCAACCTG |
| | | AAGATGTGGCTACCTACTACTGCCAAAAGTACAACTCCGCAC |
| | | CTTTTACTTTCGGACCGGGGACCAAAGTGGACATTAAGACCA |
| | | CTACCCCAGCACCGAGGCCACCCACCCCGGCTCCTACCATCG |
| | | CCTCCCAGCCTCTGTCCCTGCGTCCGGAGGCATGTAGACCCGC |
| | | AGCTGGTGGGGCCGTGCATACCCGGGGTCTTGACTTCGCCTG |
| | | CGATATCTACATTTGGGCCCCTCTGGCTGGTACTTGCGGGGTC |
| | | CTGCTGCTTTCACTCGTGATCACTCTTTACTGTAAGCGCGGTC |
| | | GGAAGAAGCTGCTGTACATCTTTAAGCAACCCTTCATGAGGC |
| | | CTGTGCAGACTACTCAAGAGGAGGACGGCTGTTCATGCCGGT |
| | | TCCCAGAGGAGGAGGAAGGCGGCTGCGAACTGCGCGTGAAA |
| | | TTCAGCCGCAGCGCAGATGCTCCAGCCTACAAGCAGGGGCAG |
| | | AACCAGCTCTACAACGAACTCAATCTTGGTCGGAGAGAGGAG |
| | | TACGACGTGCTGGACAAGCGGAGAGGACGGGACCCAGAAAT |
| | | GGGCGGGAAGCCGCGCAGAAAGAATCCCCAAGAGGGCCTGT |
| | | ACAACGAGCTCCAAAAGGATAAGATGGCAGAAGCCTATAGC |
| | | GAGATTGGTATGAAAGGGGAACGCAGAAGAGGCAAAGGCCA |
| | | CGACGGACTGTACCAGGGACTCAGCACCGCCACCAAGGACAC |
| | | CTATGACGCTCTTCACATGCAGGCCCTGCCGCCTCGG |

149368

| | | |
|---|---|---|
| 149368-aa | 1527 | QVQLVQSGAEVKKPGSSVKVSCKASGGTFSSYAISWVRQAPGQ |
| ScFv | | GLEWMGGIIPIFGTANYAQKFQGRVTITADESTSTAYMELSSLRS |
| domain | | EDTAVYYCARRGGYQLLRWDVGLLRSAFDIWGQGTMVTVSSG |
| | | GGGSGGGGSGGGGSSYVLTQPPSVSVAPGQTARITCGGNNIGSK |
| | | SVHWYQQKPGQAPVLVLYGKNNRPSGVPDRFSGSRSGTTASLTI |
| | | TGAQAEDEADYYCSSRDSSGDHLRVFGTGTKVTVL |
| 149368-nt | 1528 | CAAGTGCAGCTGGTCCAGTCGGGCGCCGAGGTCAAGAAGCCC |
| ScFv | | GGGAGCTCTGTGAAAGTGTCCTGCAAGGCCTCCGGGGGCACC |
| domain | | TTTAGCTCCTACGCCATCTCCTGGGTCCGCCAAGCACCGGGTC |
| | | AAGGCCTGGAGTGGATGGGGGGAATTATCCCTATCTTCGGCA |
| | | CTGCCAACTACGCCCAGAAGTTCCAGGGACGCGTGACCATTA |
| | | CCGCGGACGAATCCACCTCCACCGCTTATATGGAGCTGTCCA |
| | | GCTTGCGCTCGGAAGATACCGCCGTGTACTACTGCGCCCGGA |
| | | GGGGTGGATACCAGCTGCTGAGATGGGACGTGGGCCTCCTGC |
| | | GGTCGGCGTTCGACATCTGGGGCCAGGGCACTATGGTCACTG |
| | | TGTCCAGCGGAGGAGGCGGATCGGGAGGCGGCGGATCAGGG |
| | | GGAGGCGGTTCCAGCTACGTGCTTACTCAACCCCCTTCGGTGT |
| | | CCGTGGCCCCGGGACAGACCGCCAGAATCACTTGCGGAGGAA |
| | | ACAACATTGGGTCCAAGAGCGTGCATTGGTACCAGCAGAAGC |
| | | CAGGACAGGCCCCTGTGCTGGTGCTCTACGGGAAGAACAATC |
| | | GGCCCAGCGGAGTGCCGGACAGGTTCTCGGGTTCACGCTCCG |
| | | GTACAACCGCTTCACTGACTATCACCGGGGCCCAGGCAGAGG |
| | | ATGAAGCGGACTACTACTGTTCCTCCCGGGATTCATCCGGCG |
| | | ACCACCTCCGGGTGTTCGGAACCGGAACGAAGGTCACCGTGC |
| | | TG |
| 149368-aa | 1529 | QVQLVQSGAEVKKPGSSVKVSCKASGGTFSSYAISWVRQAPGQ |
| VH | | GLEWMGGIIPIFGTANYAQKFQGRVTITADESTSTAYMELSSLRS |
| | | EDTAVYYCARRGGYQLLRWDVGLLRSAFDIWGQGTMVTVSS |
| 149368-aa | 1530 | SYVLTQPPSVSVAPGQTARITCGGNNIGSKSVHWYQQKPGQAPV |
| VL | | LVLYGKNNRPSGVPDRFSGSRSGTTASLTITGAQAEDEADYYCS |
| | | SRDSSGDHLRVFGTGTKVTVL |
| 149368-aa | 1531 | MALPVTALLLPLALLLHAARPQVQLVQSGAEVKKPGSSVKVSC |
| Full CAR | | KASGGTFSSYAISWVRQAPGQGLEWMGGIIPIFGTANYAQKFQG |
| | | RVTITADESTSTAYMELSSLRSEDTAVYYCARRGGYQLLRWDV |
| | | GLLRSAFDIWGQGTMVTVSSGGGGSGGGGSGGGGSSYVLTQPP |
| | | SVSVAPGQTARITCGGNNIGSKSVHWYQQKPGQAPVLVLYGKN |
| | | NRPSGVPDRFSGSRSGTTASLTITGAQAEDEADYYCSSRDSSGDH |
| | | LRVFGTGTKVTVLTTTPAPRPPTPAPTIASQPLSLRPEACRPAAGG |
| | | AVHTRGLDFACDIYIWAPLAGTCGVLLLSLVITLYCKRGRKKLL |
| | | YIFKQPFMRPVQTTQEEDGCSCRFPEEEEGGCELRVKFSRSADAP |
| | | AYKQGQNQLYNELNLGRREEYDVLDKRRGRDPEMGGKPRRKN |
| | | PQEGLYNELQKDKMAEAYSEIGMKGERRRGKGHDGLYQGLST |
| | | ATKDTYDALHMQALPPR |
| 149368-nt | 1532 | ATGGCCCTCCCTGTCACCGCCCTGCTGCTTCCGCTGGCTCTTC |
| Full CAR | | TGCTCCACGCCGCTCGGCCCCAAGTGCAGCTGGTCCAGTCGG |
| | | GCGCCGAGGTCAAGAAGCCCGGGAGCTCTGTGAAAGTGTCCT |
| | | GCAAGGCCTCCGGGGGCACCTTTAGCTCCTACGCCATCTCCTG |
| | | GGTCCGCCAAGCACCGGGTCAAGGCCTGGAGTGGATGGGGG |
| | | GAATTATCCCTATCTTCGGCACTGCCAACTACGCCCAGAAGTT |
| | | CCAGGGACGCGTGACCATTACCGCGGACGAATCCACCTCCAC |
| | | CGCTTATATGGAGCTGTCCAGCTTGCGCTCGGAAGATACCGC |
| | | CGTGTACTACTGCGCCCGGAGGGGTGGATACCAGCTGCTGAG |
| | | ATGGGACGTGGGCCTCCTGCGGTCGGCGTTCGACATCTGGGG |
| | | CCAGGGCACTATGGTCACTGTGTCCAGCGGAGGAGGCGGATC |
| | | GGGAGGCGGCGGATCAGGGGGAGGCGGTTCCAGCTACGTGCT |
| | | TACTCAACCCCCTTCGGTGTCCGTGGCCCCGGGACAGACCGC |
| | | CAGAATCACTTGCGGAGGAAACAACATTGGGTCCAAGAGCGT |
| | | GCATTGGTACCAGCAGAAGCCAGGACAGGCCCCTGTGCTGGT |
| | | GCTCTACGGGAAGAACAATCGGCCCAGCGGAGTGCCGGACA |
| | | GGTTCTCGGGTTCACGCTCCGGTACAACCGCTTCACTGACTAT |
| | | CACCGGGGCCCAGGCAGAGGATGAAGCGGACTACTACTGTTC |
| | | CTCCCGGGATTCATCCGGCGACCACCTCCGGGTGTTCGGAAC |
| | | CGGAACGAAGGTCACCGTGCTGACCACTACCCCAGCACCGAG |
| | | GCCACCCACCCCGGCTCCTACCATCGCCTCCCAGCCTCTGTCC |
| | | CTGCGTCCGGAGGCATGTAGACCCGCAGCTGGTGGGGCCGTG |
| | | CATACCCGGGGTCTTGACTTCGCCTGCGATATCTACATTTGGG |
| | | CCCCTCTGGCTGGTACTTGCGGGGTCCTGCTGCTTTCACTCGT |
| | | GATCACTCTTTACTGTAAGCGCGGTCGGAAGAAGCTGCTGTA |
| | | CATCTTTAAGCAACCCTTCATGAGGCCTGTGCAGACTACTCAA |
| | | GAGGAGGACGGCTGTTCATGCCGGTTCCCAGAGGAGGAGGA |
| | | AGGCGGCTGCGAACTGCGCGTGAAATTCAGCCGCAGCGCAGA |
| | | TGCTCCAGCCTACAAGCAGGGGCAGAACCAGCTCTACAACGA |
| | | ACTCAATCTTGGTCGGAGAGAGGAGTACGACGTGCTGGACAA |
| | | GCGGAGAGGACGGGACCCAGAAATGGGCGGGAAGCCGCGCA |
| | | GAAAGAATCCCCAAGAGGGCCTGTACAACGAGCTCCAAAAG |
| | | GATAAGATGGCAGAAGCCTATAGCGAGATTGGTATGAAAGG |
| | | GGAACGCAGAAGAGGCAAAGGCCACGACGGACTGTACCAGG |
| | | GACTCAGCACCGCCACCAAGGACACCTATGACGCTCTTCACA |
| | | TGCAGGCCCTGCCGCCTCGG |

149369

| | | |
|---|---|---|
| 149369-aa | 1533 | EVQLQQSGPGLVKPSQTLSLTCAISGDSVSSNSAAWNWIRQSPSR |
| ScFv | | GLEWLGRTYYRSKWYSFYAISLKSRIIINPDTSKNQFSLQLKSVTP |
| domain | | EDTAVYYCARSSPEGLFLYWFDPWGQGTLVTVSSGGDGSGGGG |
| | | SGGGGSSSELTQDPAVSVALGQTIRITCQGDSLGNYYATWYQQK |
| | | PGQAPVLVIYGTNNRPSGIPDRFSASSSGNTASLTITGAQAEDEA |
| | | DYYCNSRDSSGHHLLFGTGTKVTVL |
| 149369-nt | 1534 | GAAGTGCAGCTCCAACAGTCAGGACCGGGGCTCGTGAAGCCA |
| ScFv | | TCCCAGACCCTGTCCCTGACTTGTGCCATCTCGGGAGATAGCG |
| domain | | TGTCATCGAACTCCGCCGCCTGGAACTGGATTCGGCAGAGCC |
| | | CGTCCCGCGGACTGGAGTGGCTTGGAAGGACCTACTACCGGT |
| | | CCAAGTGGTACTCTTTCTACGCGATCTCGCTGAAGTCCCGCAT |
| | | TATCATTAACCCTGATACCTCCAAGAATCAGTTCTCCCTCCAA |
| | | CTGAAATCCGTCACCCCCGAGGACACAGCAGTGTATTACTGC |
| | | GCACGGAGCAGCCCCGAAGGACTGTTCCTGTATTGGTTTGAC |
| | | CCCTGGGGCCAGGGGACTCTTGTGACCGTGTCGAGCGGCGGA |
| | | GATGGGTCCGGTGGCGGTGGTTCGGGGGGCGGCGGATCATCA |
| | | TCCGAACTGACCCAGGACCCGGCTGTGTCCGTGGCGCTGGGA |
| | | CAAACCATCCGCATTACGTGCCAGGGAGACTCCCTGGGCAAC |
| | | TACTACGCCACTTGGTACCAGCAGAAGCCGGGCCAAGCCCCT |
| | | GTGTTGGTCATCTACGGGACCAACAACAGACCTTCCGGCATC |
| | | CCCGACCGGTTCAGCGCTTCGTCCTCCGGCAACACTGCCAGCC |
| | | TGACCATCACTGGAGCGCAGGCCGAAGATGAGGCCGACTACT |
| | | ACTGCAACAGCAGAGACTCCTCGGGTCATCACCTCTTGTTCGG |
| | | AACTGGAACCAAGGTCACCGTGCTG |
| 149369-aa | 1535 | EVQLQQSGPGLVKPSQTLSLTCAISGDSVSSNSAAWNWIRQSPSR |
| VH | | GLEWLGRTYYRSKWYSFYAISLKSRIIINPDTSKNQFSLQLKSVTP |
| | | EDTAVYYCARSSPEGLFLYWFDPWGQGTLVTVSS |
| 149369-aa | 1536 | SSELTQDPAVSVALGQTRITCQGDSLGNYYATWYQQKPGQAPV |
| VL | | LVIYGTNNRPSGIPDRFSASSSGNTASLTITGAQAEDEADYYCNS |
| | | RDSSGHHLLFGTGTKVTVL |
| 149369-aa | 1537 | MALPVTALLLPLALLLHAARPEVQLQQSGPGLVKPSQTLSLTCAI |
| Full CAR | | SGDSVSSNSAAWNWIRQSPSRGLEWLGRTYYRSKWYSFYAISLK |
| | | SRIIINPDTSKNQFSLQLKSVTPEDTAVYYCARSSPEGLFLYWFDP |
| | | WGQGTLVTVSSGGDGSGGGGSGGGGSSSELTQDPAVSVALGQT |
| | | IRITCQGDSLGNYYATWYQQKPGQAPVLVIYGTNNRPSGIPDRFS |
| | | ASSSGNTASLTITGAQAEDEADYYCNSRDSSGHHLLFGTGTKVT |
| | | VLTTTPAPRPPTPAPTIASQPLSLRPEACRPAAGGAVHTRGLDFA |
| | | CDIYIWAPLAGTCGVLLLSLVITLYCKRGRKKLLYIFKQPFMRPV |
| | | QTTQEEDGCSCRFPEEEEGGCELRVKFSRSADAPAYKQGQNQLY |
| | | NELNLGRREEYDVLDKRRGRDPEMGGKPRRKNPQEGLYNELQK |
| | | DKMAEAYSEIGMKGERRRGKGHDGLYQGLSTATKDTYDALHM |
| | | QALPPR |
| 149369-nt | 1538 | ATGGCCCTCCCTGTCACCGCCCTGCTGCTTCCGCTGGCTCTTC |
| Full CAR | | TGCTCCACGCCGCTCGGCCCGAAGTGCAGCTCCAACAGTCAG |
| | | GACCGGGGCTCGTGAAGCCATCCCAGACCCTGTCCCTGACTT |
| | | GTGCCATCTCGGGAGATAGCGTGTCATCGAACTCCGCCGCCT |
| | | GGAACTGGATTCGGCAGAGCCCGTCCCGCGGACTGGAGTGGC |
| | | TTGGAAGGACCTACTACCGGTCCAAGTGGTACTCTTTCTACGC |
| | | GATCTCGCTGAAGTCCCGCATTATCATTAACCCTGATACCTCC |
| | | AAGAATCAGTTCTCCCTCCAACTGAAATCCGTCACCCCCGAG |
| | | GACACAGCAGTGTATTACTGCGCACGGAGCAGCCCCGAAGGA |
| | | CTGTTCCTGTATTGGTTTGACCCCTGGGGCCAGGGGACTCTTG |
| | | TGACCGTGTCGAGCGGCGGAGATGGGTCCGGTGGCGGTGGTT |
| | | CGGGGGGCGGCGGATCATCATCCGAACTGACCCAGGACCCGG |
| | | CTGTGTCCGTGGCGCTGGGACAAACCATCCGCATTACGTGCC |
| | | AGGGAGACTCCCTGGGCAACTACTACGCCACTTGGTACCAGC |
| | | AGAAGCCGGGCCAAGCCCCTGTGTTGGTCATCTACGGGACCA |
| | | ACAACAGACCTTCCGGCATCCCCGACCGGTTCAGCGCTTCGTC |
| | | CTCCGGCAACACTGCCAGCCTGACCATCACTGGAGCGCAGGC |
| | | CGAAGATGAGGCCGACTACTACTGCAACAGCAGAGACTCCTC |
| | | GGGTCATCACCTCTTGTTCGGAACTGGAACCAAGGTCACCGT |
| | | GCTGACCACTACCCCAGCACCGAGGCCACCCACCCCGGCTCC |
| | | TACCATCGCCTCCCAGCCTCTGTCCCTGCGTCCGGAGGCATGT |
| | | AGACCCGCAGCTGGTGGGGCCGTGCATACCCGGGGTCTTGAC |
| | | TTCGCCTGCGATATCTACATTTGGGCCCCTCTGGCTGGTACTT |
| | | GCGGGGTCCTGCTGCTTTCACTCGTGATCACTCTTTACTGTAA |
| | | GCGCGGTCGGAAGAAGCTGCTGTACATCTTTAAGCAACCCTT |
| | | CATGAGGCCTGTGCAGACTACTCAAGAGGAGGACGGCTGTTC |
| | | ATGCCGGTTCCCAGAGGAGGAGGAAGGCGGCTGCGAACTGC |
| | | GCGTGAAATTCAGCCGCAGCGCAGATGCTCCAGCCTACAAGC |
| | | AGGGGCAGAACCAGCTCTACAACGAACTCAATCTTGGTCGGA |
| | | GAGAGGAGTACGACGTGCTGGACAAGCGGAGAGGACGGGAC |
| | | CCAGAAATGGGCGGGAAGCCGCGCAGAAAGAATCCCCAAGA |
| | | GGGCCTGTACAACGAGCTCCAAAAGGATAAGATGGCAGAAG |
| | | CCTATAGCGAGATTGGTATGAAAGGGGAACGCAGAAGAGGC |
| | | AAAGGCCACGACGGACTGTACCAGGGACTCAGCACCGCCACC |
| | | AAGGACACCTATGACGCTCTTCACATGCAGGCCCTGCCGCCT |
| | | CGG |

BCMA_EBB-C1978-A4

| | | |
|---|---|---|
| BCMA_EBB- | 1539 | EVQLVESGGGLVQPGGSLRLSCAASGFTFSSYAMSWVRQAPGK |
| C1978-A4- | | GLEWVSAISGSGGSTYYADSVKGRFTISRDNSKNTLYLQMNSLR |
| aa | | AEDTAVYYCAKVEGSGSLDYWGQGTLVTVSSGGGGSGGGGSG |
| ScFv | | GGGSEIVMTQSPGTLSLSPGERATLSCRASQSVSSAYLAWYQQK |
| domain | | PGQPPRLLISGASTRATGIPDRFGGSGSGTDFTLTISRLEPEDFAVY |
| | | YCQHYGSSFNGSSLFTFGQGTRLEIK |
| BCMA_EBB- | 1540 | GAAGTGCAGCTCGTGGAGTCAGGAGGCGGCCTGGTCCAGCCG |
| C1978-A4- | | GGAGGGTCCCTTAGACTGTCATGCGCCGCAAGCGGATTCACT |
| nt | | TTCTCCTCCTATGCCATGAGCTGGGTCCGCCAAGCCCCCGGAA |
| ScFv | | AGGGACTGGAATGGGTGTCCGCCATCTCGGGGTCTGGAGGCT |
| domain | | CAACTTACTACGCTGACTCCGTGAAGGGACGGTTCACCATTA |
| | | GCCGCGACAACTCCAAGAACACCCTCTACCTCCAAATGAACT |
| | | CCCTGCGGGCCGAGGATACCGCCGTCTACTACTGCGCCAAAG |
| | | TGGAAGGTTCAGGATCGCTGGACTACTGGGGACAGGGTACTC |
| | | TCGTGACCGTGTCATCGGGCGGAGGAGGTTCCGGCGGTGGCG |
| | | GCTCCGGCGGCGGAGGGTCGGAGATCGTGATGACCCAGAGCC |
| | | CTGGTACTCTGAGCCTTTCGCCGGGAGAAAGGGCCACCCTGT |
| | | CCTGCCGCGCTTCCCAATCCGTGTCCTCCGCGTACTTGGCGTG |
| | | GTACCAGCAGAAGCCGGGACAGCCCCCTCGGCTGCTGATCAG |
| | | CGGGGCCAGCACCCGGGCAACCGGAATCCCAGACAGATTCGG |
| | | GGGTTCCGGCAGCGGCACAGATTTCACCCTGACTATTTCGAG |
| | | GTTGGAGCCCGAGGACTTTGCGGTGTATTACTGTCAGCACTAC |
| | | GGGTCGTCCTTTAATGGCTCCAGCCTGTTCACGTTCGGACAGG |
| | | GGACCCGCCTGGAAATCAAG |
| BCMA_EBB- | 1541 | EVQLVESGGGLVQPGGSLRLSCAASGFTFSSYAMSWVRQAPGK |
| C1978-A4- | | GLEWVSAISGSGGSTYYADSVKGRFTISRDNSKNTLYLQMNSLR |
| aa | | AEDTAVYYCAKVEGSGSLDYWGQGTLVTVSS |
| VH | | |
| BCMA_EBB- | 1542 | EIVMTQSPGTLSLSPGERATLSCRASQSVSSAYLAWYQQKPGQPP |
| C1978-A4- | | RLLISGASTRATGIPDRFGGSGSGTDFTLTISRLEPEDFAVYYCQH |
| aa | | YGSSFNGSSLFTFGQGTRLEIK |
| VL | | |
| BCMA_EBB- | 1543 | MALPVTALLLPLALLLHAARPEVQLVESGGGLVQPGGSLRLSCA |
| C1978-A4- | | ASGFTFSSYAMSWVRQAPGKGLEWVSAISGSGGSTYYADSVKG |
| aa | | RFTISRDNSKNTLYLQMNSLRAEDTAVYYCAKVEGSGSLDYWG |
| Full CART | | QGTLVTVSSGGGGSGGGGSGGGGSEIVMTQSPGTLSLSPGERAT |
| | | LSCRASQSVSSAYLAWYQQKPGQPPRLLISGASTRATGIPDRFGG |
| | | SGSGTDFTLTISRLEPEDFAVYYCQHYGSSFNGSSLFTFGQGTRLE |
| | | IKTTTPAPRPPTPAPTIASQPLSLRPEACRPAAGGAVHTRGLDFAC |
| | | DIYIWAPLAGTCGVLLLSLVITLYCKRGRKKLLYIFKQPFMRPVQ |
| | | TTQEEDGCSCRFPEEEEGGCELRVKFSRSADAPAYKQGQNQLYN |
| | | ELNLGRREEYDVLDKRRGRDPEMGGKPRRKNPQEGLYNELQKD |
| | | KMAEAYSEIGMKGERRRGKGHDGLYQGLSTATKDTYDALHMQ |
| | | ALPPR |
| BCMA_EBB- | 1544 | ATGGCCCTCCCTGTCACCGCCCTGCTGCTTCCGCTGGCTCTTC |
| C1978-A4- | | TGCTCCACGCCGCTCGGCCCGAAGTGCAGCTCGTGGAGTCAG |
| nt | | GAGGCGGCCTGGTCCAGCCGGGAGGGTCCCTTAGACTGTCAT |
| Full CART | | GCGCCGCAAGCGGATTCACTTTCTCCTCCTATGCCATGAGCTG |
| | | GGTCCGCCAAGCCCCCGGAAAGGGACTGGAATGGGTGTCCGC |
| | | CATCTCGGGGTCTGGAGGCTCAACTTACTACGCTGACTCCGTG |
| | | AAGGGACGGTTCACCATTAGCCGCGACAACTCCAAGAACACC |
| | | CTCTACCTCCAAATGAACTCCCTGCGGGCCGAGGATACCGCC |
| | | GTCTACTACTGCGCCAAAGTGGAAGGTTCAGGATCGCTGGAC |
| | | TACTGGGGACAGGGTACTCTCGTGACCGTGTCATCGGGCGGA |
| | | GGAGGTTCCGGCGGTGGCGGCTCCGGCGGCGGAGGGTCGGA |
| | | GATCGTGATGACCCAGAGCCCTGGTACTCTGAGCCTTTCGCCG |
| | | GGAGAAAGGGCCACCCTGTCCTGCCGCGCTTCCCAATCCGTG |
| | | TCCTCCGCGTACTTGGCGTGGTACCAGCAGAAGCCGGGACAG |
| | | CCCCCTCGGCTGCTGATCAGCGGGGCCAGCACCCGGGCAACC |
| | | GGAATCCCAGACAGATTCGGGGGTTCCGGCAGCGGCACAGAT |
| | | TTCACCCTGACTATTTCGAGGTTGGAGCCCGAGGACTTTGCGG |
| | | TGTATTACTGTCAGCACTACGGGTCGTCCTTTAATGGCTCCAG |
| | | CCTGTTCACGTTCGGACAGGGGACCCGCCTGGAAATCAAGAC |
| | | CACTACCCCAGCACCGAGGCCACCCACCCCGGCTCCTACCAT |
| | | CGCCTCCCAGCCTCTGTCCCTGCGTCCGGAGGCATGTAGACCC |
| | | GCAGCTGGTGGGGCCGTGCATACCCGGGGTCTTGACTTCGCC |
| | | TGCGATATCTACATTTGGGCCCCTCTGGCTGGTACTTGCGGGG |
| | | TCCTGCTGCTTTCACTCGTGATCACTCTTTACTGTAAGCGCGG |
| | | TCGGAAGAAGCTGCTGTACATCTTTAAGCAACCCTTCATGAG |
| | | GCCTGTGCAGACTACTCAAGAGGAGGACGGCTGTTCATGCCG |
| | | GTTCCCAGAGGAGGAGGAAGGCGGCTGCGAACTGCGCGTGA |
| | | AATTCAGCCGCAGCGCAGATGCTCCAGCCTACAAGCAGGGGC |
| | | AGAACCAGCTCTACAACGAACTCAATCTTGGTCGGAGAGAGG |
| | | AGTACGACGTGCTGGACAAGCGGAGAGGACGGGACCCAGAA |
| | | ATGGGCGGGAAGCCGCGCAGAAAGAATCCCCAAGAGGGCCT |
| | | GTACAACGAGCTCCAAAAGGATAAGATGGCAGAAGCCTATA |
| | | GCGAGATTGGTATGAAAGGGGAACGCAGAAGAGGCAAAGGC |
| | | CACGACGGACTGTACCAGGGACTCAGCACCGCCACCAAGGAC |
| | | ACCTATGACGCTCTTCACATGCAGGCCCTGCCGCCTCGG |

BCMA_EBB-C1978-G1

| | | |
|---|---|---|
| BCMA_EBB- | 1545 | EVQLVETGGGLVQPGGSLRLSCAASGITFSRYPMSWVRQAPGKG |
| C1978-G1- | | LEWVSGISDSGVSTYYADSAKGRFTISRDNSKNTLFLQMSSLRDE |
| aa | | DTAVYYCVTRAGSEASDIWGQGTMVTVSSGGGGSGGGGSGGG |
| ScFv | | GSEIVLTQSPATLSLSPGERATLSCRASQSVSNSLAWYQQKPGQA |
| domain | | PRLLIYDASSRATGIPDRFSGSGSGTDFTLTISRLEPEDFAIYYCQQ |
| | | FGTSSGLTFGGGTKLEIK |
| BCMA_EBB- | 1546 | GAAGTGCAACTGGTGGAAACCGGTGGCGGCCTGGTGCAGCCT |
| C1978-G1- | | GGAGGATCATTGAGGCTGTCATGCGCGGCCAGCGGTATTACC |
| nt | | TTCTCCCGGTACCCCATGTCCTGGGTCAGACAGGCCCCGGGG |
| ScFv | | AAAGGGCTTGAATGGGTGTCCGGGATCTCGGACTCCGGTGTC |
| domain | | AGCACTTACTACGCCGACTCCGCCAAGGGACGCTTCACCATTT |
| | | CCCGGGACAACTCGAAGAACACCCTGTTCCTCCAAATGAGCT |
| | | CCCTCCGGGACGAGGATACTGCAGTGTACTACTGCGTGACCC |
| | | GCGCCGGGTCCGAGGCGTCTGACATTTGGGGACAGGGCACTA |
| | | TGGTCACCGTGTCGTCCGGCGGAGGGGGCTCGGGAGGCGGTG |
| | | GCAGCGGAGGAGGAGGGTCCGAGATCGTGCTGACCCAATCCC |
| | | CGGCCACCCTCTCGCTGAGCCCTGGAGAAAGGGCAACCTTGT |
| | | CCTGTCGCGCGAGCCAGTCCGTGAGCAACTCCCTGGCCTGGT |
| | | ACCAGCAGAAGCCCGGACAGGCTCCGAGACTTCTGATCTACG |
| | | ACGCTTCGAGCCGGGCCACTGGAATCCCCGACCGCTTTTCGG |
| | | GGTCCGGCTCAGGAACCGATTTCACCCTGACAATCTCACGGC |
| | | TGGAGCCAGAGGATTTCGCCATCTATTACTGCCAGCAGTTCG |
| | | GTACTTCCTCCGGCCTGACTTTCGGAGGCGGCACGAAGCTCG |
| | | AAATCAAG |
| BCMA_EBB- | 1547 | EVQLVETGGGLVQPGGSLRLSCAASGITFSRYPMSWVRQAPGKG |
| C1978-G1- | | LEWVSGISDSGVSTYYADSAKGRFTISRDNSKNTLFLQMSSLRDE |
| aa | | DTAVYYCVTRAGSEASDIWGQGTMVTVSS |
| VH | | |
| BCMA_EBB- | 1548 | EIVLTQSPATLSLSPGERATLSCRASQSVSNSLAWYQQKPGQAPR |
| C1978-G1- | | LLIYDASSRATGIPDRFSGSGSGTDFTLTISRLEPEDFAIYYCQQFG |
| aa | | TSSGLTFGGGTKLEIK |
| VL | | |
| BCMA_EBB- | 1549 | MALPVTALLLPLALLLHAARPEVQLVETGGGLVQPGGSLRLSCA |
| C1978-G1- | | ASGITFSRYPMSWVRQAPGKGLEWVSGISDSGVSTYYADSAKGR |
| aa | | FTISRDNSKNTLFLQMSSLRDEDTAVYYCVTRAGSEASDIWGQG |
| Full CART | | TMVTVSSGGGGSGGGGSGGGGSEIVLTQSPATLSLSPGERATLSC |
| | | RASQSVSNSLAWYQQKPGQAPRLLIYDASSRATGIPDRFSGSGSG |
| | | TDFTLTISRLEPEDFAIYYCQQFGTSSGLTFGGGTKLEIKTTTPAPR |
| | | PPTPAPTIASQPLSLRPEACRPAAGGAVHTRGLDFACDIYIWAPL |
| | | AGTCGVLLLSLVITLYCKRGRKKLLYIFKQPFMRPVQTTQEEDG |
| | | CSCRFPEEEEGGCELRVKFSRSADAPAYKQGQNQLYNELNLGRR |
| | | EEYDVLDKRRGRDPEMGGKPRRKNPQEGLYNELQKDKMAEAY |
| | | SEIGMKGERRRGKGHDGLYQGLSTATKDTYDALHMQALPPR |
| BCMA_EBB- | 1550 | ATGGCCCTCCCTGTCACCGCCCTGCTGCTTCCGCTGGCTCTTC |
| C1978-G1- | | TGCTCCACGCCGCTCGGCCCGAAGTGCAACTGGTGGAAACCG |
| nt | | GTGGCGGCCTGGTGCAGCCTGGAGGATCATTGAGGCTGTCAT |
| Full CART | | GCGCGGCCAGCGGTATTACCTTCTCCCGGTACCCCATGTCCTG |
| | | GGTCAGACAGGCCCCGGGGAAAGGGCTTGAATGGGTGTCCGG |
| | | GATCTCGGACTCCGGTGTCAGCACTTACTACGCCGACTCCGCC |
| | | AAGGGACGCTTCACCATTTCCCGGGACAACTCGAAGAACACC |
| | | CTGTTCCTCCAAATGAGCTCCCTCCGGGACGAGGATACTGCA |
| | | GTGTACTACTGCGTGACCCGCGCCGGGTCCGAGGCGTCTGAC |
| | | ATTTGGGGACAGGGCACTATGGTCACCGTGTCGTCCGGCGGA |
| | | GGGGGCTCGGGAGGCGGTGGCAGCGGAGGAGGAGGGTCCGA |
| | | GATCGTGCTGACCCAATCCCCGGCCACCCTCTCGCTGAGCCCT |
| | | GGAGAAAGGGCAACCTTGTCCTGTCGCGCGAGCCAGTCCGTG |
| | | AGCAACTCCCTGGCCTGGTACCAGCAGAAGCCCGGACAGGCT |
| | | CCGAGACTTCTGATCTACGACGCTTCGAGCCGGGCCACTGGA |
| | | ATCCCCGACCGCTTTTCGGGGTCCGGCTCAGGAACCGATTTCA |
| | | CCCTGACAATCTCACGGCTGGAGCCAGAGGATTTCGCCATCT |
| | | ATTACTGCCAGCAGTTCGGTACTTCCTCCGGCCTGACTTTCGG |
| | | AGGCGGCACGAAGCTCGAAATCAAGACCACTACCCCAGCACC |
| | | GAGGCCACCCACCCCGGCTCCTACCATCGCCTCCCAGCCTCTG |
| | | TCCCTGCGTCCGGAGGCATGTAGACCCGCAGCTGGTGGGGCC |
| | | GTGCATACCCGGGGTCTTGACTTCGCCTGCGATATCTACATTT |
| | | GGGCCCCTCTGGCTGGTACTTGCGGGGTCCTGCTGCTTTCACT |
| | | CGTGATCACTCTTTACTGTAAGCGCGGTCGGAAGAAGCTGCT |
| | | GTACATCTTTAAGCAACCCTTCATGAGGCCTGTGCAGACTACT |
| | | CAAGAGGAGGACGGCTGTTCATGCCGGTTCCCAGAGGAGGAG |
| | | GAAGGCGGCTGCGAACTGCGCGTGAAATTCAGCCGCAGCGCA |
| | | GATGCTCCAGCCTACAAGCAGGGGCAGAACCAGCTCTACAAC |
| | | GAACTCAATCTTGGTCGGAGAGAGGAGTACGACGTGCTGGAC |
| | | AAGCGGAGAGGACGGGACCCAGAAATGGGCGGGAAGCCGCG |
| | | CAGAAAGAATCCCCAAGAGGGCCTGTACAACGAGCTCCAAA |
| | | AGGATAAGATGGCAGAAGCCTATAGCGAGATTGGTATGAAA |
| | | GGGGAACGCAGAAGAGGCAAAGGCCACGACGGACTGTACCA |
| | | GGGACTCAGCACCGCCACCAAGGACACCTATGACGCTCTTCA |
| | | CATGCAGGCCCTGCCGCCTCGG |

BCMA_EBB-C1979-C1

| | | |
|---|---|---|
| BCMA_EBB- | 1551 | QVQLVESGGGLVQPGGSLRLSCAASGFTFSSYAMSWVRQAPGK |
| C1979-C1- | | GLEWVSAISGSGGSTYYADSVKGRFTISRDNAKNSLYLQMNSLR |
| aa | | AEDTAIYYCARATYKRELRYYYGMDVWGQGTMVTVSSGGGGS |
| ScFv | | GGGGSGGGGSEIVMTQSPGTVSLSPGERATLSCRASQSVSSSFLA |
| domain | | WYQQKPGQAPRLLIYGASSRATGIPDRFSGSGSGTDFTLTISRLEP |
| | | EDSAVYYCQQYHSSPSWTFGQGTRLEIK |
| BCMA_EBB- | 1552 | CAAGTGCAGCTCGTGGAATCGGGTGGCGGACTGGTGCAGCCG |
| C1979-C1- | | GGGGGCTCACTTAGACTGTCCTGCGCGGCCAGCGGATTCACT |
| nt | | TTCTCCTCCTACGCCATGTCCTGGGTCAGACAGGCCCCTGGAA |
| ScFv | | AGGGCCTGGAATGGGTGTCCGCAATCAGCGGCAGCGGCGGCT |
| domain | | CGACCTATTACGCGGATTCAGTGAAGGGCAGATTCACCATTT |
| | | CCCGGGACAACGCCAAGAACTCCTTGTACCTTCAAATGAACT |
| | | CCCTCCGCGCGGAAGATACCGCAATCTACTACTGCGCTCGGG |
| | | CCACTTACAAGAGGGAACTGCGCTACTACTACGGGATGGACG |
| | | TCTGGGGCCAGGGAACCATGGTCACCGTGTCCAGCGGAGGAG |
| | | GAGGATCGGGAGGAGGCGGTAGCGGGGGTGGAGGGTCGGAG |
| | | ATCGTGATGACCCAGTCCCCCGGCACTGTGTCGCTGTCCCCCG |
| | | GCGAACGGGCCACCCTGTCATGTCGGGCCAGCCAGTCAGTGT |
| | | CGTCAAGCTTCCTCGCCTGGTACCAGCAGAAACCGGGACAAG |
| | | CTCCCCGCCTGCTGATCTACGGAGCCAGCAGCCGGGCCACCG |
| | | GTATTCCTGACCGGTTCTCCGGTTCGGGGTCCGGGACCGACTT |
| | | TACTCTGACTATCTCTCGCCTCGAGCCAGAGGACTCCGCCGTG |
| | | TATTACTGCCAGCAGTACCACTCCTCCCCGTCCTGGACGTTCG |
| | | GACAGGGCACAAGGCTGGAGATTAAG |
| BCMA_EBB- | 1553 | QVQLVESGGGLVQPGGSLRLSCAASGFTFSSYAMSWVRQAPGK |
| C1979-C1- | | GLEWVSAISGSGGSTYYADSVKGRFTISRDNAKNSLYLQMNSLR |
| aa | | AEDTAIYYCARATYKRELRYYYGMDVWGQGTMVTVSS |
| VH | | |
| BCMA_EBB- | 1554 | EIVMTQSPGTVSLSPGERATLSCRASQSVSSSFLAWYQQKPGQAP |
| C1979-C1- | | RLLIYGASSRATGIPDRFSGSGSGTDFTLTISRLEPEDSAVYYCQQ |
| aa | | YHSSPSWTFGQGTRLEIK |
| VL | | |
| BCMA_EBB- | 1555 | MALPVTALLLPLALLLHAARPQVQLVESGGGLVQPGGSLRLSCA |
| C1979-C1- | | ASGFTFSSYAMSWVRQAPGKGLEWVSAISGSGGSTYYADSVKG |
| aa | | RFTISRDNAKNSLYLQMNSLRAEDTAIYYCARATYKRELRYYYG |
| Full CART | | MDVWGQGTMVTVSSGGGGSGGGGSGGGGSEIVMTQSPGTVSL |
| | | SPGERATLSCRASQSVSSSFLAWYQQKPGQAPRLLIYGASSRATG |
| | | IPDRFSGSGSGTDFTLTISRLEPEDSAVYYCQQYHSSPSWTFGQGT |
| | | RLEIKTTTPAPRPPTPAPTIASQPLSLRPEACRPAAGGAVHTRGLD |
| | | FACDIYIWAPLAGTCGVLLLSLVITLYCKRGRKKLLYIFKQPFMR |
| | | PVQTTQEEDGCSCRFPEEEEGGCELRVKFSRSADAPAYKQGQNQ |
| | | LYNELNLGRREEYDVLDKRRGRDPEMGGKPRRKNPQEGLYNEL |
| | | QKDKMAEAYSEIGMKGERRRGKGHDGLYQGLSTATKDTYDAL |
| | | HMQALPPR |
| BCMA_EBB- | 1556 | ATGGCCCTCCCTGTCACCGCCCTGCTGCTTCCGCTGGCTCTTC |
| C1979-C1- | | TGCTCCACGCCGCTCGGCCCCAAGTGCAGCTCGTGGAATCGG |
| nt | | GTGGCGGACTGGTGCAGCCGGGGGGCTCACTTAGACTGTCCT |
| Full CART | | GCGCGGCCAGCGGATTCACTTTCTCCTCCTACGCCATGTCCTG |
| | | GGTCAGACAGGCCCCTGGAAAGGGCCTGGAATGGGTGTCCGC |
| | | AATCAGCGGCAGCGGCGGCTCGACCTATTACGCGGATTCAGT |
| | | GAAGGGCAGATTCACCATTTCCCGGGACAACGCCAAGAACTC |
| | | CTTGTACCTTCAAATGAACTCCCTCCGCGCGGAAGATACCGC |
| | | AATCTACTACTGCGCTCGGGCCACTTACAAGAGGGAACTGCG |
| | | CTACTACTACGGGATGGACGTCTGGGGCCAGGGAACCATGGT |
| | | CACCGTGTCCAGCGGAGGAGGAGGATCGGGAGGAGGCGGTA |
| | | GCGGGGGTGGAGGGTCGGAGATCGTGATGACCCAGTCCCCCG |
| | | GCACTGTGTCGCTGTCCCCCGGCGAACGGGCCACCCTGTCAT |
| | | GTCGGGCCAGCCAGTCAGTGTCGTCAAGCTTCCTCGCCTGGTA |
| | | CCAGCAGAAACCGGGACAAGCTCCCCGCCTGCTGATCTACGG |
| | | AGCCAGCAGCCGGGCCACCGGTATTCCTGACCGGTTCTCCGG |
| | | TTCGGGGTCCGGGACCGACTTTACTCTGACTATCTCTCGCCTC |
| | | GAGCCAGAGGACTCCGCCGTGTATTACTGCCAGCAGTACCAC |
| | | TCCTCCCCGTCCTGGACGTTCGGACAGGGCACAAGGCTGGAG |
| | | ATTAAGACCACTACCCCAGCACCGAGGCCACCCACCCCGGCT |
| | | CCTACCATCGCCTCCCAGCCTCTGTCCCTGCGTCCGGAGGCAT |
| | | GTAGACCCGCAGCTGGTGGGGCCGTGCATACCCGGGGTCTTG |
| | | ACTTCGCCTGCGATATCTACATTTGGGCCCCTCTGGCTGGTAC |
| | | TTGCGGGGTCCTGCTGCTTTCACTCGTGATCACTCTTTACTGT |
| | | AAGCGCGGTCGGAAGAAGCTGCTGTACATCTTTAAGCAACCC |
| | | TTCATGAGGCCTGTGCAGACTACTCAAGAGGAGGACGGCTGT |
| | | TCATGCCGGTTCCCAGAGGAGGAGGAAGGCGGCTGCGAACTG |
| | | CGCGTGAAATTCAGCCGCAGCGCAGATGCTCCAGCCTACAAG |
| | | CAGGGGCAGAACCAGCTCTACAACGAACTCAATCTTGGTCGG |
| | | AGAGAGGAGTACGACGTGCTGGACAAGCGGAGAGGACGGGA |
| | | CCCAGAAATGGGCGGGAAGCCGCGCAGAAAGAATCCCCAAG |
| | | AGGGCCTGTACAACGAGCTCCAAAAGGATAAGATGGCAGAA |
| | | GCCTATAGCGAGATTGGTATGAAAGGGGAACGCAGAAGAGG |
| | | CAAAGGCCACGACGGACTGTACCAGGGACTCAGCACCGCCAC |
| | | CAAGGACACCTATGACGCTCTTCACATGCAGGCCCTGCCGCC |
| | | TCGG |

BCMA_EBB-C1978-C7

| | | |
|---|---|---|
| BCMA_EBB- | 1557 | EVQLVETGGGLVQPGGSLRLSCAASGFTFSSYAMSWVRQAPGK |
| C1978-C7- | | GLEWVSAISGSGGSTYYADSVKGRFTISRDNSKNTLYLQMNTLK |
| aa | | AEDTAVYYCARATYKRELRYYYGMDVWGQGTTVTVSSGGGGS |
| ScFv | | GGGGSGGGGSEIVLTQSPSTLSLSPGESATLSCRASQSVSTTFLA |
| domain | | WYQQKPGQAPRLLIYGSSNRATGIPDRFSGSGSGTDFTLTIRRLEP |
| | | EDFAVYYCQQYHSSPSWTFGQGTKVEIK |
| BCMA_EBB- | 1558 | GAGGTGCAGCTTGTGGAAACCGGTGGCGGACTGGTGCAGCCC |
| C1978-C7- | | GGAGGAAGCCTCAGGCTGTCCTGCGCCGCGTCCGGCTTCACC |
| nt | | TTCTCCTCGTACGCCATGTCCTGGGTCCGCCAGGCCCCCGGAA |
| ScFv | | AGGGCCTGGAATGGGTGTCCGCCATCTCTGGAAGCGGAGGTT |
| domain | | CCACGTACTACGCGGACAGCGTCAAGGGAAGGTTCACAATCT |
| | | CCCGCGATAATTCGAAGAACACTCTGTACCTTCAAATGAACA |
| | | CCCTGAAGGCCGAGGACACTGCTGTGTACTACTGCGCACGGG |
| | | CCACCTACAAGAGAGAGCTCCGGTACTACTACGGAATGGACG |
| | | TCTGGGGCCAGGGAACTACTGTGACCGTGTCCTCGGGAGGGG |
| | | GTGGCTCCGGGGGGGGCGGCTCCGGCGGAGGCGGTTCCGAGA |
| | | TTGTGCTGACCCAGTCACCTTCAACTCTGTCGCTGTCCCCGGG |
| | | AGAGAGCGCTACTCTGAGCTGCCGGGCCAGCCAGTCCGTGTC |
| | | CACCACCTTCCTCGCCTGGTATCAGCAGAAGCCGGGGCAGGC |
| | | ACCACGGCTCTTGATCTACGGGTCAAGCAACAGAGCGACCGG |
| | | AATTCCTGACCGCTTCTCGGGGAGCGGTTCAGGCACCGACTTC |
| | | ACCCTGACTATCCGGCGCCTGGAACCCGAAGATTTCGCCGTG |
| | | TATTACTGTCAACAGTACCACTCCTCGCCGTCCTGGACCTTTG |
| | | GCCAAGGAACCAAAGTGGAAATCAAG |
| BCMA_EBB- | 1559 | EVQLVETGGGLVQPGGSLRLSCAASGFTFSSYAMSWVRQAPGK |
| C1978-C7- | | GLEWVSAISGSGGSTYYADSVKGRFTISRDNSKNTLYLQMNTLK |
| aa | | AEDTAVYYCARATYKRELRYYYGMDVWGQGTTVTVSS |
| VH | | |
| BCMA_EBB- | 1560 | EIVLTQSPSTLSLSPGESATLSCRASQSVSTTFLAWYQQKPGQAP |
| C1978-C7- | | RLLIYGSSNRATGIPDRFSGSGSGTDFTLTIRRLEPEDFAVYYCQQ |
| aa | | YHSSPSWTFGQGTKVEIK |
| VL | | |
| BCMA_EBB- | 1561 | MALPVTALLLPLALLLHAARPEVQLVETGGGLVQPGGSLRLSCA |
| C1978-C7- | | ASGFTFSSYAMSWVRQAPGKGLEWVSAISGSGGSTYYADSVKG |
| aa | | RFTISRDNSKNTLYLQMNTLKAEDTAVYYCARATYKRELRYYY |
| Full CART | | GMDVWGQGTTVTVSSGGGGSGGGGSGGGGSEIVLTQSPSTLSLS |
| | | PGESATLSCRASQSVSTTFLAWYQQKPGQAPRLLIYGSSNRATGI |
| | | PDRFSGSGSGTDFTLTIRRLEPEDFAVYYCQQYHSSPSWTFGQGT |
| | | KVEIKTTTPAPRPPTPAPTIASQPLSLRPEACRPAAGGAVHTRGLD |
| | | FACDIYIWAPLAGTCGVLLLSLVITLYCKRGRKKLLYIFKQPFMR |
| | | PVQTTQEEDGCSCRFPEEEEGGCELRVKFSRSADAPAYKQGQNQ |
| | | LYNELNLGRREEYDVLDKRRGRDPEMGGKPRRKNPQEGLYNEL |
| | | QKDKMAEAYSEIGMKGERRRGKGHDGLYQGLSTATKDTYDAL |
| | | HMQALPPR |
| BCMA_EBB- | 1562 | ATGGCCCTCCCTGTCACCGCCCTGCTGCTTCCGCTGGCTCTTC |
| C1978-C7- | | TGCTCCACGCCGCTCGGCCCGAGGTGCAGCTTGTGGAAACCG |
| nt | | GTGGCGGACTGGTGCAGCCCGGAGGAAGCCTCAGGCTGTCCT |
| Full CART | | GCGCCGCGTCCGGCTTCACCTTCTCCTCGTACGCCATGTCCTG |
| | | GGTCCGCCAGGCCCCCGGAAAGGGCCTGGAATGGGTGTCCGC |
| | | CATCTCTGGAAGCGGAGGTTCCACGTACTACGCGGACAGCGT |
| | | CAAGGGAAGGTTCACAATCTCCCGCGATAATTCGAAGAACAC |
| | | TCTGTACCTTCAAATGAACACCCTGAAGGCCGAGGACACTGC |
| | | TGTGTACTACTGCGCACGGGCCACCTACAAGAGAGAGCTCCG |
| | | GTACTACTACGGAATGGACGTCTGGGGCCAGGGAACTACTGT |
| | | GACCGTGTCCTCGGGAGGGGGTGGCTCCGGGGGGGGCGGCTC |
| | | CGGCGGAGGCGGTTCCGAGATTGTGCTGACCCAGTCACCTTC |
| | | AACTCTGTCGCTGTCCCCGGGAGAGAGCGCTACTCTGAGCTG |
| | | CCGGGCCAGCCAGTCCGTGTCCACCACCTTCCTCGCCTGGTAT |
| | | CAGCAGAAGCCGGGGCAGGCACCACGGCTCTTGATCTACGGG |
| | | TCAAGCAACAGAGCGACCGGAATTCCTGACCGCTTCTCGGGG |
| | | AGCGGTTCAGGCACCGACTTCACCCTGACTATCCGGCGCCTG |
| | | GAACCCGAAGATTTCGCCGTGTATTACTGTCAACAGTACCACT |
| | | CCTCGCCGTCCTGGACCTTTGGCCAAGGAACCAAAGTGGAAA |
| | | TCAAGACCACTACCCCAGCACCGAGGCCACCCACCCCGGCTC |
| | | CTACCATCGCCTCCCAGCCTCTGTCCCTGCGTCCGGAGGCATG |
| | | TAGACCCGCAGCTGGTGGGGCCGTGCATACCCGGGGTCTTGA |
| | | CTTCGCCTGCGATATCTACATTTGGGCCCCTCTGGCTGGTACT |
| | | TGCGGGGTCCTGCTGCTTTCACTCGTGATCACTCTTTACTGTA |
| | | AGCGCGGTCGGAAGAAGCTGCTGTACATCTTTAAGCAACCCT |
| | | TCATGAGGCCTGTGCAGACTACTCAAGAGGAGGACGGCTGTT |
| | | CATGCCGGTTCCCAGAGGAGGAGGAAGGCGGCTGCGAACTGC |
| | | GCGTGAAATTCAGCCGCAGCGCAGATGCTCCAGCCTACAAGC |
| | | AGGGGCAGAACCAGCTCTACAACGAACTCAATCTTGGTCGGA |
| | | GAGAGGAGTACGACGTGCTGGACAAGCGGAGAGGACGGGAC |
| | | CCAGAAATGGGCGGGAAGCCGCGCAGAAAGAATCCCCAAGA |
| | | GGGCCTGTACAACGAGCTCCAAAAGGATAAGATGGCAGAAG |
| | | CCTATAGCGAGATTGGTATGAAAGGGGAACGCAGAAGAGGC |
| | | AAAGGCCACGACGGACTGTACCAGGGACTCAGCACCGCCACC |
| | | AAGGACACCTATGACGCTCTTCACATGCAGGCCCTGCCGCCT |
| | | CGG |

BCMA_EBB-C1978-D10

| | | |
|---|---|---|
| BCMA_EBB- | 1563 | EVQLVETGGGLVQPGRSLRLSCAASGFTFDDYAMHWVRQAPGK |
| C1978- | | GLEWVSGISWNSGSIGYADSVKGRFTISRDNAKNSLYLQMNSLR |
| D10-aa | | DEDTAVYYCARVGKAVPDVWGQGTTVTVSSGGGGSGGGGSGG |
| ScFv | | GGSDIVMTQTPSSLSASVGDRVTITCRASQSISSYLNWYQQKPGK |
| domain | | APKLLIYAASSLQSGVPSRFSGSGSGTDFTLTISSLQPEDFATYYC |
| | | QQSYSTPYSFGQGTRLEIK |
| BCMA_EBB- | 1564 | GAAGTGCAGCTCGTGGAAACTGGAGGTGGACTCGTGCAGCCT |
| C1978- | | GGACGGTCGCTGCGGCTGAGCTGCGCTGCATCCGGCTTCACC |
| D10-nt | | TTCGACGATTATGCCATGCACTGGGTCAGACAGGCGCCAGGG |
| ScFv | | AAGGGACTTGAGTGGGTGTCCGGTATCAGCTGGAATAGCGGC |
| domain | | TCAATCGGATACGCGGACTCCGTGAAGGGAAGGTTCACCATT |
| | | TCCCGCGACAACGCCAAGAACTCCCTGTACTTGCAAATGAAC |
| | | AGCCTCCGGGATGAGGACACTGCCGTGTACTACTGCGCCCGC |
| | | GTCGGAAAAGCTGTGCCCGACGTCTGGGGCCAGGGAACCACT |
| | | GTGACCGTGTCCAGCGGCGGGGGTGGATCGGGCGGTGGAGG |
| | | GTCCGGTGGAGGGGGCTCAGATATTGTGATGACCCAGACCCC |
| | | CTCGTCCCTGTCCGCCTCGGTCGGCGACCGCGTGACTATCACA |
| | | TGTAGAGCCTCGCAGAGCATCTCCAGCTACCTGAACTGGTAT |
| | | CAGCAGAAGCCGGGGAAGGCCCCGAAGCTCCTGATCTACGCG |
| | | GCATCATCACTGCAATCGGGAGTGCCGAGCCGGTTTTCCGGG |
| | | TCCGGCTCCGGCACCGACTTCACGCTGACCATTTCTTCCCTGC |
| | | AACCCGAGGACTTCGCCACTTACTACTGCCAGCAGTCCTACTC |
| | | CACCCCTTACTCCTTCGGCCAAGGAACCAGGCTGGAAATCAAG |
| BCMA_EBB- | 1565 | EVQLVETGGGLVQPGRSLRLSCAASGFTFDDYAMHWVRQAPGK |
| C1978- | | GLEWVSGISWNSGSIGYADSVKGRFTISRDNAKNSLYLQMNSLR |
| D10-aa | | DEDTAVYYCARVGKAVPDVWGQGTTVTVSS |
| VH | | |
| BCMA_EBB- | 1566 | DIVMTQTPSSLSASVGDRVTITCRASQSISSYLNWYQQKPGKAPK |
| C1978- | | LLIYAASSLQSGVPSRFSGSGSGTDFTLTISSLQPEDFATYYCQQS |
| D10-aa | | YSTPYSFGQGTRLEIK |
| VL | | |
| BCMA_EBB- | 1567 | MALPVTALLLPLALLLHAARPEVQLVETGGGLVQPGRSLRLSCA |
| C1978- | | ASGFTFDDYAMHWVRQAPGKGLEWVSGISWNSGSIGYADSVK |
| D10-aa | | GRFTISRDNAKNSLYLQMNSLRDEDTAVYYCARVGKAVPDVW |
| Full CART | | GQGTTVTVSSGGGGSGGGGSGGGGSDIVMTQTPSSLSASVGDRV |
| | | TITCRASQSISSYLNWYQQKPGKAPKLLIYAASSLQSGVPSRFSGS |
| | | GSGTDFTLTISSLQPEDFATYYCQQSYSTPYSFGQGTRLEIKTTTP |
| | | APRPPTPAPTIASQPLSLRPEACRPAAGGAVHTRGLDFACDIYIW |
| | | APLAGTCGVLLLSLVITLYCKRGRKKLLYIFKQPFMRPVQTTQEE |
| | | DGCSCRFPEEEEGGCELRVKFSRSADAPAYKQGQNQLYNELNLG |
| | | RREEYDVLDKRRGRDPEMGGKPRRKNPQEGLYNELQKDKMAE |
| | | AYSEIGMKGERRRGKGHDGLYQGLSTATKDTYDALHMQALPPR |
| BCMA_EBB- | 1568 | ATGGCCCTCCCTGTCACCGCCCTGCTGCTTCCGCTGGCTCTTC |
| C1978- | | TGCTCCACGCCGCTCGGCCCGAAGTGCAGCTCGTGGAAACTG |
| D10-nt | | GAGGTGGACTCGTGCAGCCTGGACGGTCGCTGCGGCTGAGCT |
| Full CART | | GCGCTGCATCCGGCTTCACCTTCGACGATTATGCCATGCACTG |
| | | GGTCAGACAGGCGCCAGGGAAGGGACTTGAGTGGGTGTCCG |
| | | GTATCAGCTGGAATAGCGGCTCAATCGGATACGCGGACTCCG |
| | | TGAAGGGAAGGTTCACCATTTCCCGCGACAACGCCAAGAACT |
| | | CCCTGTACTTGCAAATGAACAGCCTCCGGGATGAGGACACTG |
| | | CCGTGTACTACTGCGCCCGCGTCGGAAAAGCTGTGCCCGACG |
| | | TCTGGGGCCAGGGAACCACTGTGACCGTGTCCAGCGGCGGGG |
| | | GTGGATCGGGCGGTGGAGGGTCCGGTGGAGGGGGCTCAGAT |
| | | ATTGTGATGACCCAGACCCCCTCGTCCCTGTCCGCCTCGGTCG |
| | | GCGACCGCGTGACTATCACATGTAGAGCCTCGCAGAGCATCT |
| | | CCAGCTACCTGAACTGGTATCAGCAGAAGCCGGGGAAGGCCC |
| | | CGAAGCTCCTGATCTACGCGGCATCATCACTGCAATCGGGAG |
| | | TGCCGAGCCGGTTTTCCGGGTCCGGCTCCGGCACCGACTTCAC |
| | | GCTGACCATTTCTTCCCTGCAACCCGAGGACTTCGCCACTTAC |
| | | TACTGCCAGCAGTCCTACTCCACCCCTTACTCCTTCGGCCAAG |
| | | GAACCAGGCTGGAAATCAAGACCACTACCCCAGCACCGAGGC |
| | | CACCCACCCCGGCTCCTACCATCGCCTCCCAGCCTCTGTCCCT |
| | | GCGTCCGGAGGCATGTAGACCCGCAGCTGGTGGGGCCGTGCA |
| | | TACCCGGGGTCTTGACTTCGCCTGCGATATCTACATTTGGGCC |
| | | CCTCTGGCTGGTACTTGCGGGGTCCTGCTGCTTTCACTCGTGA |
| | | TCACTCTTTACTGTAAGCGCGGTCGGAAGAAGCTGCTGTACAT |
| | | CTTTAAGCAACCCTTCATGAGGCCTGTGCAGACTACTCAAGA |
| | | GGAGGACGGCTGTTCATGCCGGTTCCCAGAGGAGGAGGAAG |
| | | GCGGCTGCGAACTGCGCGTGAAATTCAGCCGCAGCGCAGATG |
| | | CTCCAGCCTACAAGCAGGGGCAGAACCAGCTCTACAACGAAC |
| | | TCAATCTTGGTCGGAGAGAGGAGTACGACGTGCTGGACAAGC |
| | | GGAGAGGACGGGACCCAGAAATGGGCGGGAAGCCGCGCAGA |
| | | AAGAATCCCCAAGAGGGCCTGTACAACGAGCTCCAAAAGGAT |
| | | AAGATGGCAGAAGCCTATAGCGAGATTGGTATGAAAGGGGA |
| | | ACGCAGAAGAGGCAAAGGCCACGACGGACTGTACCAGGGAC |
| | | TCAGCACCGCCACCAAGGACACCTATGACGCTCTTCACATGC |
| | | AGGCCCTGCCGCCTCGG |

BCMA_EBB-C1979-C12

| | | |
|---|---|---|
| BCMA_EBB- | 1569 | EVQLVESGGGLVQPGRSLRLSCTASGFTFDDYAMHWVRQRPGK |
| C1979- | | GLEWVASINWKGNSLAYGDSVKGRFAISRDNAKNTVFLQMNSL |
| C12-aa | | RTEDTAVYYCASHQGVAYYNYAMDVWGRGTLVTVSSGGGGS |
| ScFv | | GGGGSGGGGSEIVLTQSPGTLSLSPGERATLSCRATQSIGSSFLA |
| domain | | WYQQRPGQAPRLLIYGASQRATGIPDRFSGRGSGTDFTLTISRVE |
| | | PEDSAVYYCQHYESSPSWTFGQGTKVEIK |
| BCMA_EBB- | 1570 | GAAGTGCAGCTCGTGGAGAGCGGGGGAGGATTGGTGCAGCC |
| C1979- | | CGGAAGGTCCCTGCGGCTCTCCTGCACTGCGTCTGGCTTCACC |
| C12-nt | | TTCGACGACTACGCGATGCACTGGGTCAGACAGCGCCCGGGA |
| ScFv | | AAGGGCCTGGAATGGGTCGCCTCAATCAACTGGAAGGGAAAC |
| domain | | TCCCTGGCCTATGGCGACAGCGTGAAGGGCCGCTTCGCCATTT |
| | | CGCGCGACAACGCCAAGAACACCGTGTTTCTGCAAATGAATT |
| | | CCCTGCGGACCGAGGATACCGCTGTGTACTACTGCGCCAGCC |
| | | ACCAGGGCGTGGCATACTATAACTACGCCATGGACGTGTGGG |
| | | GAAGAGGGACGCTCGTCACCGTGTCCTCCGGGGGCGGTGGAT |
| | | CGGGTGGAGGAGGAAGCGGTGGCGGGGGCAGCGAAATCGTG |
| | | CTGACTCAGAGCCCGGGAACTCTTTCACTGTCCCCGGGAGAA |
| | | CGGGCCACTCTCTCGTGCCGGGCCACCCAGTCCATCGGCTCCT |
| | | CCTTCCTTGCCTGGTACCAGCAGAGGCCAGGACAGGCGCCCC |
| | | GCCTGCTGATCTACGGTGCTTCCCAACGCGCCACTGGCATTCC |
| | | TGACCGGTTCAGCGGCAGAGGGTCGGGAACCGATTTCACACT |
| | | GACCATTTCCCGGGTGGAGCCCGAAGATTCGGCAGTCTACTA |
| | | CTGTCAGCATTACGAGTCCTCCCCTTCATGGACCTTCGGTCAA |
| | | GGGACCAAAGTGGAGATCAAG |
| BCMA_EBB- | 1571 | EVQLVESGGGLVQPGRSLRLSCTASGFTFDDYAMHWVRQRPGK |
| C1979- | | GLEWVASINWKGNSLAYGDSVKGRFAISRDNAKNTVFLQMNSL |
| C12-aa | | RTEDTAVYYCASHQGVAYYNYAMDVWGRGTLVTVSS |
| VH | | |
| BCMA_EBB- | 1572 | EIVLTQSPGTLSLSPGERATLSCRATQSIGSSFLAWYQQRPGQAPR |
| C1979- | | LLIYGASQRATGIPDRFSGRGSGTDFTLTISRVEPEDSAVYYCQH |
| C12-aa | | YESSPSWTFGQGTKVEIK |
| VL | | |
| BCMA_EBB- | 1573 | MALPVTALLLPLALLLHAARPEVQLVESGGGLVQPGRSLRLSCT |
| C1979- | | ASGFTFDDYAMHWVRQRPGKGLEWVASINWKGNSLAYGDSVK |
| C12-aa | | GRFAISRDNAKNTVFLQMNSLRTEDTAVYYCASHQGVAYYNYA |
| Full CART | | MDVWGRGTLVTVSSGGGGSGGGGSGGGGSEIVLTQSPGTLSLSP |
| | | GERATLSCRATQSIGSSFLAWYQQRPGQAPRLLIYGASQRATGIP |
| | | DRFSGRGSGTDFTLTISRVEPEDSAVYYCQHYESSPSWTFGQGTK |
| | | VEIKTTTPAPRPPTPAPTIASQPLSLRPEACRPAAGGAVHTRGLDF |
| | | ACDIYIWAPLAGTCGVLLLSLVITLYCKRGRKKLLYIFKQPFMRP |
| | | VQTTQEEDGCSCRFPEEEEGGCELRVKFSRSADAPAYKQGQNQL |
| | | YNELNLGRREEYDVLDKRRGRDPEMGGKPRRKNPQEGLYNELQ |
| | | KDKMAEAYSEIGMKGERRRGKGHDGLYQGLSTATKDTYDALH |
| | | MQALPPR |
| BCMA_EBB- | 1574 | ATGGCCCTCCCTGTCACCGCCCTGCTGCTTCCGCTGGCTCTTC |
| C1979- | | TGCTCCACGCCGCTCGGCCCGAAGTGCAGCTCGTGGAGAGCG |
| C12-nt | | GGGGAGGATTGGTGCAGCCCGGAAGGTCCCTGCGGCTCTCCT |
| Full CART | | GCACTGCGTCTGGCTTCACCTTCGACGACTACGCGATGCACTG |
| | | GGTCAGACAGCGCCCGGGAAAGGGCCTGGAATGGGTCGCCTC |
| | | AATCAACTGGAAGGGAAACTCCCTGGCCTATGGCGACAGCGT |
| | | GAAGGGCCGCTTCGCCATTTCGCGCGACAACGCCAAGAACAC |
| | | CGTGTTTCTGCAAATGAATTCCCTGCGGACCGAGGATACCGCT |
| | | GTGTACTACTGCGCCAGCCACCAGGGCGTGGCATACTATAAC |
| | | TACGCCATGGACGTGTGGGGAAGAGGGACGCTCGTCACCGTG |
| | | TCCTCCGGGGGCGGTGGATCGGGTGGAGGAGGAAGCGGTGG |
| | | CGGGGGCAGCGAAATCGTGCTGACTCAGAGCCCGGGAACTCT |
| | | TTCACTGTCCCCGGGAGAACGGGCCACTCTCTCGTGCCGGGC |
| | | CACCCAGTCCATCGGCTCCTCCTTCCTTGCCTGGTACCAGCAG |
| | | AGGCCAGGACAGGCGCCCCGCCTGCTGATCTACGGTGCTTCC |
| | | CAACGCGCCACTGGCATTCCTGACCGGTTCAGCGGCAGAGGG |
| | | TCGGGAACCGATTTCACACTGACCATTTCCCGGGTGGAGCCC |
| | | GAAGATTCGGCAGTCTACTACTGTCAGCATTACGAGTCCTCCC |
| | | CTTCATGGACCTTCGGTCAAGGGACCAAAGTGGAGATCAAGA |
| | | CCACTACCCCAGCACCGAGGCCACCCACCCCGGCTCCTACCA |
| | | TCGCCTCCCAGCCTCTGTCCCTGCGTCCGGAGGCATGTAGACC |
| | | CGCAGCTGGTGGGGCCGTGCATACCCGGGGTCTTGACTTCGC |
| | | CTGCGATATCTACATTTGGGCCCCTCTGGCTGGTACTTGCGGG |
| | | GTCCTGCTGCTTTCACTCGTGATCACTCTTTACTGTAAGCGCG |
| | | GTCGGAAGAAGCTGCTGTACATCTTTAAGCAACCCTTCATGA |
| | | GGCCTGTGCAGACTACTCAAGAGGAGGACGGCTGTTCATGCC |
| | | GGTTCCCAGAGGAGGAGGAAGGCGGCTGCGAACTGCGCGTG |
| | | AAATTCAGCCGCAGCGCAGATGCTCCAGCCTACAAGCAGGGG |
| | | CAGAACCAGCTCTACAACGAACTCAATCTTGGTCGGAGAGAG |
| | | GAGTACGACGTGCTGGACAAGCGGAGAGGACGGGACCCAGA |
| | | AATGGGCGGGAAGCCGCGCAGAAAGAATCCCCAAGAGGGCC |
| | | TGTACAACGAGCTCCAAAAGGATAAGATGGCAGAAGCCTATA |
| | | GCGAGATTGGTATGAAAGGGGAACGCAGAAGAGGCAAAGGC |
| | | CACGACGGACTGTACCAGGGACTCAGCACCGCCACCAAGGAC |
| | | ACCTATGACGCTCTTCACATGCAGGCCCTGCCGCCTCGG |

BCMA_EBB-C1980-G4

| | | |
|---|---|---|
| BCMA_EBB- | 1575 | EVQLVESGGGLVQPGGSLRLSCAASGFTFSSYAMSWVRQAPGK |
| C1980- | | GLEWVSAISGSGGSTYYADSVKGRFTISRDNSKNTLYLQMNSLR |
| G4-aa | | AEDTAVYYCAKVVRDGMDVWGQGTTVTVSSGGGGSGGGGSG |
| ScFv | | GGGSEIVLTQSPATLSLSPGERATLSCRASQSVSSSYLAWYQQKP |
| domain | | GQAPRLLIYGASSRATGIPDRFSGNGSGTDFTLTISRLEPEDFAVY |
| | | YCQQYGSPPRFTFGPGTKVDIK |
| BCMA_EBB- | 1576 | GAGGTGCAGTTGGTCGAAAGCGGGGGCGGGCTTGTGCAGCCT |
| C1980- | | GGCGGATCACTGCGGCTGTCCTGCGCGGCATCAGGCTTCACG |
| G4-nt | | TTTTCTTCCTACGCCATGTCCTGGGTGCGCCAGGCCCCTGGAA |
| ScFv | | AGGGACTGGAATGGGTGTCCGCGATTTCGGGGTCCGGCGGGA |
| domain | | GCACCTACTACGCCGATTCCGTGAAGGGCCGCTTCACTATCTC |
| | | GCGGGACAACTCCAAGAACACCCTCTACCTCCAAATGAATAG |
| | | CCTGCGGGCCGAGGATACCGCCGTCTACTATTGCGCTAAGGT |
| | | CGTGCGCGACGGAATGGACGTGTGGGGACAGGGTACCACCGT |
| | | GACAGTGTCCTCGGGGGGAGGCGGTAGCGGCGGAGGAGGAA |
| | | GCGGTGGTGGAGGTTCCGAGATTGTGCTGACTCAATCACCCG |
| | | CGACCCTGAGCCTGTCCCCCGGCGAAAGGGCCACTCTGTCCT |
| | | GTCGGGCCAGCCAATCAGTCTCCTCCTCGTACCTGGCCTGGTA |
| | | CCAGCAGAAGCCAGGACAGGCTCCGAGACTCCTTATCTATGG |
| | | CGCATCCTCCCGCGCCACCGGAATCCCGGATAGGTTCTCGGG |
| | | AAACGGATCGGGGACCGACTTCACTCTCACCATCTCCCGGCT |
| | | GGAACCGGAGGACTTCGCCGTGTACTACTGCCAGCAGTACGG |
| | | CAGCCCGCCTAGATTCACTTTCGGCCCCGGCACCAAAGTGGA |
| | | CATCAAG |
| BCMA_EBB- | 1577 | EVQLVESGGGLVQPGGSLRLSCAASGFTFSSYAMSWVRQAPGK |
| C1980- | | GLEWVSAISGSGGSTYYADSVKGRFTISRDNSKNTLYLQMNSLR |
| G4-aa | | AEDTAVYYCAKVVRDGMDVWGQGTTVTVSS |
| VH | | |
| BCMA_EBB- | 1578 | EIVLTQSPATLSLSPGERATLSCRASQSVSSSYLAWYQQKPGQAP |
| C1980- | | RLLIYGASSRATGIPDRFSGNGSGTDFTLTISRLEPEDFAVYYCQQ |
| G4-aa | | YGSPPRFTFGPGTKVDIK |
| VL | | |
| BCMA_EBB- | 1579 | MALPVTALLLPLALLLHAARPEVQLVESGGGLVQPGGSLRLSCA |
| C1980- | | ASGFTFSSYAMSWVRQAPGKGLEWVSAISGSGGSTYYADSVKG |
| G4-aa | | RFTISRDNSKNTLYLQMNSLRAEDTAVYYCAKVVRDGMDVWG |
| Full CART | | QGTTVTVSSGGGGSGGGGSGGGGSEIVLTQSPATLSLSPGERATL |
| | | SCRASQSVSSSYLAWYQQKPGQAPRLLIYGASSRATGIPDRFSGN |
| | | GSGTDFTLTISRLEPEDFAVYYCQQYGSPPRFTFGPGTKVDIKTTT |
| | | PAPRPPTPAPTIASQPLSLRPEACRPAAGGAVHTRGLDFACDIYIW |
| | | APLAGTCGVLLLSLVITLYCKRGRKKLLYIFKQPFMRPVQTTQEE |
| | | DGCSCRFPEEEEGGCELRVKFSRSADAPAYKQGQNQLYNELNLG |
| | | RREEYDVLDKRRGRDPEMGGKPRRKNPQEGLYNELQKDKMAE |
| | | AYSEIGMKGERRRGKGHDGLYQGLSTATKDTYDALHMQALPPR |
| BCMA_EBB- | 1580 | ATGGCCCTCCCTGTCACCGCCCTGCTGCTTCCGCTGGCTCTTC |
| C1980- | | TGCTCCACGCCGCTCGGCCCGAGGTGCAGTTGGTCGAAAGCG |
| G4-nt | | GGGGCGGGCTTGTGCAGCCTGGCGGATCACTGCGGCTGTCCT |
| Full CART | | GCGCGGCATCAGGCTTCACGTTTTCTTCCTACGCCATGTCCTG |
| | | GGTGCGCCAGGCCCCTGGAAAGGGACTGGAATGGGTGTCCGC |
| | | GATTTCGGGGTCCGGCGGGAGCACCTACTACGCCGATTCCGT |
| | | GAAGGGCCGCTTCACTATCTCGCGGGACAACTCCAAGAACAC |
| | | CCTCTACCTCCAAATGAATAGCCTGCGGGCCGAGGATACCGC |
| | | CGTCTACTATTGCGCTAAGGTCGTGCGCGACGGAATGGACGT |
| | | GTGGGGACAGGGTACCACCGTGACAGTGTCCTCGGGGGGAGG |
| | | CGGTAGCGGCGGAGGAGGAAGCGGTGGTGGAGGTTCCGAGA |
| | | TTGTGCTGACTCAATCACCCGCGACCCTGAGCCTGTCCCCCGG |
| | | CGAAAGGGCCACTCTGTCCTGTCGGGCCAGCCAATCAGTCTC |
| | | CTCCTCGTACCTGGCCTGGTACCAGCAGAAGCCAGGACAGGC |
| | | TCCGAGACTCCTTATCTATGGCGCATCCTCCCGCGCCACCGGA |
| | | ATCCCGGATAGGTTCTCGGGAAACGGATCGGGGACCGACTTC |
| | | ACTCTCACCATCTCCCGGCTGGAACCGGAGGACTTCGCCGTGT |
| | | ACTACTGCCAGCAGTACGGCAGCCCGCCTAGATTCACTTTCG |
| | | GCCCCGGCACCAAAGTGGACATCAAGACCACTACCCCAGCAC |
| | | CGAGGCCACCCACCCCGGCTCCTACCATCGCCTCCCAGCCTCT |
| | | GTCCCTGCGTCCGGAGGCATGTAGACCCGCAGCTGGTGGGGC |
| | | CGTGCATACCCGGGGTCTTGACTTCGCCTGCGATATCTACATT |
| | | TGGGCCCCTCTGGCTGGTACTTGCGGGGTCCTGCTGCTTTCAC |
| | | TCGTGATCACTCTTTACTGTAAGCGCGGTCGGAAGAAGCTGCT |
| | | GTACATCTTTAAGCAACCCTTCATGAGGCCTGTGCAGACTACT |
| | | CAAGAGGAGGACGGCTGTTCATGCCGGTTCCCAGAGGAGGAG |
| | | GAAGGCGGCTGCGAACTGCGCGTGAAATTCAGCCGCAGCGCA |
| | | GATGCTCCAGCCTACAAGCAGGGGCAGAACCAGCTCTACAAC |
| | | GAACTCAATCTTGGTCGGAGAGAGGAGTACGACGTGCTGGAC |
| | | AAGCGGAGAGGACGGGACCCAGAAATGGGCGGGAAGCCGCG |
| | | CAGAAAGAATCCCCAAGAGGGCCTGTACAACGAGCTCCAAA |
| | | AGGATAAGATGGCAGAAGCCTATAGCGAGATTGGTATGAAA |
| | | GGGGAACGCAGAAGAGGCAAAGGCCACGACGGACTGTACCA |
| | | GGGACTCAGCACCGCCACCAAGGACACCTATGACGCTCTTCA |
| | | CATGCAGGCCCTGCCGCCTCGG |

BCMA_EBB-C1980-D2

| | | |
|---|---|---|
| BCMA_EBB- | 1581 | EVQLLESGGGLVQPGGSLRLSCAASGFTFSSYAMSWVRQAPGK |
| C1980- | | GLEWVSAISGSGGSTYYADSVKGRFTISRDNSKNTLYLQMNSLR |
| D2-aa | | AEDTAVYYCAKIPQTGTFDYWGQGTLVTVSSGGGGSGGGGSGG |
| ScFv | | GGSEIVLTQSPGTLSLSPGERATLSCRASQSVSSSYLAWYQQRPG |
| domain | | QAPRLLIYGASSRATGIPDRFSGSGSGTDFTLTISRLEPEDFAVYY |
| | | CQHYGSSPSWTFGQGTRLEIK |
| BCMA_EBB- | 1582 | GAAGTGCAGCTGCTGGAGTCCGGCGGTGGATTGGTGCAACCG |
| C1980- | | GGGGGATCGCTCAGACTGTCCTGTGCGGCGTCAGGCTTCACC |
| D2-nt | | TTCTCGAGCTACGCCATGTCATGGGTCAGACAGGCCCCTGGA |
| ScFv | | AAGGGTCTGGAATGGGTGTCCGCCATTTCCGGGAGCGGGGGA |
| domain | | TCTACATACTACGCCGATAGCGTGAAGGGCCGCTTCACCATTT |
| | | CCCGGGACAACTCCAAGAACACTCTCTATCTGCAAATGAACT |
| | | CCCTCCGCGCTGAGGACACTGCCGTGTACTACTGCGCCAAAA |
| | | TCCCTCAGACCGGCACCTTCGACTACTGGGGACAGGGGACTC |
| | | TGGTCACCGTCAGCAGCGGTGGCGGAGGTTCGGGGGGAGGA |
| | | GGAAGCGGCGGCGGAGGGTCCGAGATTGTGCTGACCCAGTCA |
| | | CCCGGCACTTTGTCCCTGTCGCCTGGAGAAAGGGCCACCCTTT |
| | | CCTGCCGGGCATCCCAATCCGTGTCCTCCTCGTACCTGGCCTG |
| | | GTACCAGCAGAGGCCCGGACAGGCCCCACGGCTTCTGATCTA |
| | | CGGAGCAAGCAGCCGCGCGACCGGTATCCCGGACCGGTTTTC |
| | | GGGCTCGGGCTCAGGAACTGACTTCACCCTCACCATCTCCCGC |
| | | CTGGAACCCGAAGATTTCGCTGTGTATTACTGCCAGCACTACG |
| | | GCAGCTCCCCGTCCTGGACGTTCGGCCAGGGAACTCGGCTGG |
| | | AGATCAAG |
| BCMA_EBB- | 1583 | EVQLLESGGGLVQPGGSLRLSCAASGFTFSSYAMSWVRQAPGK |
| C1980- | | GLEWVSAISGSGGSTYYADSVKGRFTISRDNSKNTLYLQMNSLR |
| D2-aa | | AEDTAVYYCAKIPQTGTFDYWGQGTLVTVSS |
| VH | | |
| BCMA_EBB- | 1584 | EIVLTQSPGTLSLSPGERATLSCRASQSVSSSYLAWYQQRPGQAP |
| C1980- | | RLLIYGASSRATGIPDRFSGSGSGTDFTLTISRLEPEDFAVYYCQH |
| D2-aa | | YGSSPSWTFGQGTRLEIK |
| VL | | |
| BCMA_EBB- | 1585 | MALPVTALLLPLALLLHAARPEVQLLESGGGLVQPGGSLRLSCA |
| C1980- | | ASGFTFSSYAMSWVRQAPGKGLEWVSAISGSGGSTYYADSVKG |
| D2-aa | | RFTISRDNSKNTLYLQMNSLRAEDTAVYYCAKIPQTGTFDYWGQ |
| Full CART | | GTLVTVSSGGGGSGGGGSGGGGSEIVLTQSPGTLSLSPGERATLS |
| | | CRASQSVSSSYLAWYQQRPGQAPRLLIYGASSRATGIPDRFSGSG |
| | | SGTDFTLTISRLEPEDFAVYYCQHYGSSPSWTFGQGTRLEIKTTTP |
| | | APRPPTPAPTIASQPLSLRPEACRPAAGGAVHTRGLDFACDIYIW |
| | | APLAGTCGVLLLSLVITLYCKRGRKKLLYIFKQPFMRPVQTTQEE |
| | | DGCSCRFPEEEEGGCELRVKFSRSADAPAYKQGQNQLYNELNLG |
| | | RREEYDVLDKRRGRDPEMGGKPRRKNPQEGLYNELQKDKMAE |
| | | AYSEIGMKGERRRGKGHDGLYQGLSTATKDTYDALHMQALPPR |
| BCMA_EBB- | 1586 | ATGGCCCTCCCTGTCACCGCCCTGCTGCTTCCGCTGGCTCTTC |
| C1980- | | TGCTCCACGCCGCTCGGCCCGAAGTGCAGCTGCTGGAGTCCG |
| D2-nt | | GCGGTGGATTGGTGCAACCGGGGGGATCGCTCAGACTGTCCT |
| Full CART | | GTGCGGCGTCAGGCTTCACCTTCTCGAGCTACGCCATGTCATG |
| | | GGTCAGACAGGCCCCTGGAAAGGGTCTGGAATGGGTGTCCGC |
| | | CATTTCCGGGAGCGGGGGATCTACATACTACGCCGATAGCGT |
| | | GAAGGGCCGCTTCACCATTTCCCGGGACAACTCCAAGAACAC |
| | | TCTCTATCTGCAAATGAACTCCCTCCGCGCTGAGGACACTGCC |
| | | GTGTACTACTGCGCCAAAATCCCTCAGACCGGCACCTTCGACT |
| | | ACTGGGGACAGGGGACTCTGGTCACCGTCAGCAGCGGTGGCG |
| | | GAGGTTCGGGGGGAGGAGGAAGCGGCGGCGGAGGGTCCGAG |
| | | ATTGTGCTGACCCAGTCACCCGGCACTTTGTCCCTGTCGCCTG |
| | | GAGAAAGGGCCACCCTTTCCTGCCGGGCATCCCAATCCGTGT |
| | | CCTCCTCGTACCTGGCCTGGTACCAGCAGAGGCCCGGACAGG |
| | | CCCCACGGCTTCTGATCTACGGAGCAAGCAGCCGCGCGACCG |
| | | GTATCCCGGACCGGTTTTCGGGCTCGGGCTCAGGAACTGACTT |
| | | CACCCTCACCATCTCCCGCCTGGAACCCGAAGATTTCGCTGTG |
| | | TATTACTGCCAGCACTACGGCAGCTCCCCGTCCTGGACGTTCG |
| | | GCCAGGGAACTCGGCTGGAGATCAAGACCACTACCCCAGCAC |
| | | CGAGGCCACCCACCCCGGCTCCTACCATCGCCTCCCAGCCTCT |
| | | GTCCCTGCGTCCGGAGGCATGTAGACCCGCAGCTGGTGGGGC |
| | | CGTGCATACCCGGGGTCTTGACTTCGCCTGCGATATCTACATT |
| | | TGGGCCCCTCTGGCTGGTACTTGCGGGGTCCTGCTGCTTTCAC |
| | | TCGTGATCACTCTTTACTGTAAGCGCGGTCGGAAGAAGCTGCT |
| | | GTACATCTTTAAGCAACCCTTCATGAGGCCTGTGCAGACTACT |
| | | CAAGAGGAGGACGGCTGTTCATGCCGGTTCCCAGAGGAGGAG |
| | | GAAGGCGGCTGCGAACTGCGCGTGAAATTCAGCCGCAGCGCA |
| | | GATGCTCCAGCCTACAAGCAGGGGCAGAACCAGCTCTACAAC |
| | | GAACTCAATCTTGGTCGGAGAGAGGAGTACGACGTGCTGGAC |
| | | AAGCGGAGAGGACGGGACCCAGAAATGGGCGGGAAGCCGCG |
| | | CAGAAAGAATCCCCAAGAGGGCCTGTACAACGAGCTCCAAA |
| | | AGGATAAGATGGCAGAAGCCTATAGCGAGATTGGTATGAAA |
| | | GGGGAACGCAGAAGAGGCAAAGGCCACGACGGACTGTACCA |
| | | GGGACTCAGCACCGCCACCAAGGACACCTATGACGCTCTTCA |
| | | CATGCAGGCCCTGCCGCCTCGG |

BCMA_EBB-C1978-A10

| | | |
|---|---|---|
| BCMA_EBB- | 1587 | EVQLVETGGGLVQPGGSLRLSCAASGFTFSSYAMSWVRQAPGK |
| C1978- | | GLEWVSAISGSGGSTYYADSVKGRFTMSRENDKNSVFLQMNSL |
| A10-aa | | RVEDTGVYYCARANYKRELRYYYGMDVWGQGTMVTVSSGGG |
| ScFv | | GSGGGGSGGGGSEIVMTQSPGTLSLSPGESATLSCRASQRVASN |
| domain | | YLAWYQHKPGQAPSLLISGASSRATGVPDRFSGSGSGTDFTLAIS |
| | | RLEPEDSAVYYCQHYDSSPSWTFGQGTKVEIK |
| BCMA_EBB- | 1588 | GAAGTGCAACTGGTGGAAACCGGTGGAGGACTCGTGCAGCCT |
| C1978- | | GGCGGCAGCCTCCGGCTGAGCTGCGCCGCTTCGGGATTCACC |
| A10-nt | | TTTTCCTCCTACGCGATGTCTTGGGTCAGACAGGCCCCCGGAA |
| ScFv | | AGGGGCTGGAATGGGTGTCAGCCATCTCCGGCTCCGGCGGAT |
| domain | | CAACGTACTACGCCGACTCCGTGAAAGGCCGGTTCACCATGT |
| | | CGCGCGAGAATGACAAGAACTCCGTGTTCCTGCAAATGAACT |
| | | CCCTGAGGGTGGAGGACACCGGAGTGTACTATTGTGCGCGCG |
| | | CCAACTACAAGAGAGAGCTGCGGTACTACTACGGAATGGACG |
| | | TCTGGGGACAGGGAACTATGGTGACCGTGTCATCCGGTGGAG |
| | | GGGGAAGCGGCGGTGGAGGCAGCGGGGGCGGGGGTTCAGAA |
| | | ATTGTCATGACCCAGTCCCCGGGAACTCTTTCCCTCTCCCCCG |
| | | GGGAATCCGCGACTTTGTCCTGCCGGGCCAGCCAGCGCGTGG |
| | | CCTCGAACTACCTCGCATGGTACCAGCATAAGCCAGGCCAAG |
| | | CCCCTTCCCTGCTGATTTCCGGGGCTAGCAGCCGCGCCACTGG |
| | | CGTGCCGGATAGGTTCTCGGGAAGCGGCTCGGGTACCGATTT |
| | | CACCCTGGCAATCTCGCGGCTGGAACCGGAGGATTCGGCCGT |
| | | GTACTACTGCCAGCACTATGACTCATCCCCCTCCTGGACATTC |
| | | GGACAGGGCACCAAGGTCGAGATCAAG |
| BCMA_EBB- | 1589 | EVQLVETGGGLVQPGGSLRLSCAASGFTFSSYAMSWVRQAPGK |
| C1978- | | GLEWVSAISGSGGSTYYADSVKGRFTMSRENDKNSVFLQMNSL |
| A10-aa | | RVEDTGVYYCARANYKRELRYYYGMDVWGQGTMVTVSS |
| VH | | |
| BCMA_EBB- | 1590 | EIVMTQSPGTLSLSPGESATLSCRASQRVASNYLAWYQHKPGQA |
| C1978- | | PSLLISGASSRATGVPDRFSGSGSGTDFTLAISRLEPEDSAVYYCQ |
| A10-aa | | HYDSSPSWTFGQGTKVEIK |
| VL | | |
| BCMA_EBB- | 1591 | MALPVTALLLPLALLLHAARPEVQLVETGGGLVQPGGSLRLSCA |
| C1978- | | ASGFTFSSYAMSWVRQAPGKGLEWVSAISGSGGSTYYADSVKG |
| A10-aa | | RFTMSRENDKNSVFLQMNSLRVEDTGVYYCARANYKRELRYY |
| Full CART | | YGMDVWGQGTMVTVSSGGGGSGGGGSGGGGSEIVMTQSPGTL |
| | | SLSPGESATLSCRASQRVASNYLAWYQHKPGQAPSLLISGASSRA |
| | | TGVPDRFSGSGSGTDFTLAISRLEPEDSAVYYCQHYDSSPSWTFG |
| | | QGTKVEIKTTTPAPRPPTPAPTIASQPLSLRPEACRPAAGGAVHTR |
| | | GLDFACDIYIWAPLAGTCGVLLLSLVITLYCKRGRKKLLYIFKQP |
| | | FMRPVQTTQEEDGCSCRFPEEEEGGCELRVKFSRSADAPAYKQG |
| | | QNQLYNELNLGRREEYDVLDKRRGRDPEMGGKPRRKNPQEGL |
| | | YNELQKDKMAEAYSEIGMKGERRRGKGHDGLYQGLSTATKDT |
| | | YDALHMQALPPR |
| BCMA_EBB- | 1592 | ATGGCCCTCCCTGTCACCGCCCTGCTGCTTCCGCTGGCTCTTC |
| C1978- | | TGCTCCACGCCGCTCGGCCCGAAGTGCAACTGGTGGAAACCG |
| A10-nt | | GTGGAGGACTCGTGCAGCCTGGCGGCAGCCTCCGGCTGAGCT |
| Full CART | | GCGCCGCTTCGGGATTCACCTTTTCCTCCTACGCGATGTCTTG |
| | | GGTCAGACAGGCCCCCGGAAAGGGGCTGGAATGGGTGTCAG |
| | | CCATCTCCGGCTCCGGCGGATCAACGTACTACGCCGACTCCGT |
| | | GAAAGGCCGGTTCACCATGTCGCGCGAGAATGACAAGAACTC |
| | | CGTGTTCCTGCAAATGAACTCCCTGAGGGTGGAGGACACCGG |
| | | AGTGTACTATTGTGCGCGCGCCAACTACAAGAGAGAGCTGCG |
| | | GTACTACTACGGAATGGACGTCTGGGGACAGGGAACTATGGT |
| | | GACCGTGTCATCCGGTGGAGGGGGAAGCGGCGGTGGAGGCA |
| | | GCGGGGGCGGGGGTTCAGAAATTGTCATGACCCAGTCCCCGG |
| | | GAACTCTTTCCCTCTCCCCCGGGGAATCCGCGACTTTGTCCTG |
| | | CCGGGCCAGCCAGCGCGTGGCCTCGAACTACCTCGCATGGTA |
| | | CCAGCATAAGCCAGGCCAAGCCCCTTCCCTGCTGATTTCCGG |
| | | GGCTAGCAGCCGCGCCACTGGCGTGCCGGATAGGTTCTCGGG |
| | | AAGCGGCTCGGGTACCGATTTCACCCTGGCAATCTCGCGGCT |
| | | GGAACCGGAGGATTCGGCCGTGTACTACTGCCAGCACTATGA |
| | | CTCATCCCCCTCCTGGACATTCGGACAGGGCACCAAGGTCGA |
| | | GATCAAGACCACTACCCCAGCACCGAGGCCACCCACCCCGGC |
| | | TCCTACCATCGCCTCCCAGCCTCTGTCCCTGCGTCCGGAGGCA |
| | | TGTAGACCCGCAGCTGGTGGGGCCGTGCATACCCGGGGTCTT |
| | | GACTTCGCCTGCGATATCTACATTTGGGCCCCTCTGGCTGGTA |
| | | CTTGCGGGGTCCTGCTGCTTTCACTCGTGATCACTCTTTACTGT |
| | | AAGCGCGGTCGGAAGAAGCTGCTGTACATCTTTAAGCAACCC |
| | | TTCATGAGGCCTGTGCAGACTACTCAAGAGGAGGACGGCTGT |
| | | TCATGCCGGTTCCCAGAGGAGGAGGAAGGCGGCTGCGAACTG |
| | | CGCGTGAAATTCAGCCGCAGCGCAGATGCTCCAGCCTACAAG |
| | | CAGGGGCAGAACCAGCTCTACAACGAACTCAATCTTGGTCGG |
| | | AGAGAGGAGTACGACGTGCTGGACAAGCGGAGAGGACGGGA |
| | | CCCAGAAATGGGCGGGAAGCCGCGCAGAAAGAATCCCCAAG |
| | | AGGGCCTGTACAACGAGCTCCAAAAGGATAAGATGGCAGAA |
| | | GCCTATAGCGAGATTGGTATGAAAGGGGAACGCAGAAGAGG |
| | | CAAAGGCCACGACGGACTGTACCAGGGACTCAGCACCGCCAC |
| | | CAAGGACACCTATGACGCTCTTCACATGCAGGCCCTGCCGCC |
| | | TCGG |

BCMA_EBB-C1978-D4

| | | |
|---|---|---|
| BCMA_EBB- | 1593 | EVQLLETGGGLVQPGGSLRLSCAASGFSFSSYAMSWVRQAPGK |
| C1978- | | GLEWVSAISGSGGSTYYADSVKGRFTISRDNSKNTLYLQMNSLR |
| D4-aa | | AEDTAVYYCAKALVGATGAFDIWGQGTLVTVSSGGGGSGGGG |
| ScFv | | SGGGGSEIVLTQSPGTLSLSPGERATLSCRASQSLSSNFLAWYQQ |
| domain | | KPGQAPGLLIYGASNWATGTPDRFSGSGSGTDFTLTITRLEPEDF |
| | | AVYYCQYYGTSPMYTFGQGTKVEIK |
| BCMA_EBB- | 1594 | GAAGTGCAGCTGCTCGAAACCGGTGGAGGGCTGGTGCAGCCA |
| C1978- | | GGGGGCTCCCTGAGGCTTTCATGCGCCGCTAGCGGATTCTCCT |
| D4-nt | | TCTCCTCTTACGCCATGTCGTGGGTCCGCCAAGCCCCTGGAAA |
| ScFv | | AGGCCTGGAATGGGTGTCCGCGATTTCCGGGAGCGGAGGTTC |
| domain | | GACCTATTACGCCGACTCCGTGAAGGGCCGCTTTACCATCTCC |
| | | CGGGATAACTCCAAGAACACTCTGTACCTCCAAATGAACTCG |
| | | CTGAGAGCCGAGGACACCGCCGTGTATTACTGCGCGAAGGCG |
| | | CTGGTCGGCGCGACTGGGGCATTCGACATCTGGGGACAGGGA |
| | | ACTCTTGTGACCGTGTCGAGCGGAGGCGGCGGCTCCGGCGGA |
| | | GGAGGGAGCGGGGGCGGTGGTTCCGAAATCGTGTTGACTCAG |
| | | TCCCCGGGAACCCTGAGCTTGTCACCCGGGGAGCGGGCCACT |
| | | CTCTCCTGTCGCGCCTCCCAATCGCTCTCATCCAATTTCCTGG |
| | | CCTGGTACCAGCAGAAGCCCGGACAGGCCCCGGGCCTGCTCA |
| | | TCTACGGCGCTTCAAACTGGGCAACGGGAACCCCTGATCGGT |
| | | TCAGCGGAAGCGGATCGGGTACTGACTTTACCCTGACCATCA |
| | | CCAGACTGGAACCGGAGGACTTCGCCGTGTACTACTGCCAGT |
| | | ACTACGGCACCTCCCCCATGTACACATTCGGACAGGGTACCA |
| | | AGGTCGAGATTAAG |
| BCMA_EBB- | 1595 | EVQLLETGGGLVQPGGSLRLSCAASGFSFSSYAMSWVRQAPGK |
| C1978- | | GLEWVSAISGSGGSTYYADSVKGRFTISRDNSKNTLYLQMNSLR |
| D4-aa | | AEDTAVYYCAKALVGATGAFDIWGQGTLVTVSS |
| VH | | |
| BCMA_EBB- | 1596 | EIVLTQSPGTLSLSPGERATLSCRASQSLSSNFLAWYQQKPGQAP |
| C1978- | | GLLIYGASNWATGTPDRFSGSGSGTDFTLTITRLEPEDFAVYYCQ |
| D4-aa | | YYGTSPMYTFGQGTKVEIK |
| VL | | |
| BCMA_EBB- | 1597 | MALPVTALLLPLALLLHAARPEVQLLETGGGLVQPGGSLRLSCA |
| C1978- | | ASGFSFSSYAMSWVRQAPGKGLEWVSAISGSGGSTYYADSVKG |
| D4-aa | | RFTISRDNSKNTLYLQMNSLRAEDTAVYYCAKALVGATGAFDI |
| Full CART | | WGQGTLVTVSSGGGGSGGGGSGGGGSEIVLTQSPGTLSLSPGER |
| | | ATLSCRASQSLSSNFLAWYQQKPGQAPGLLIYGASNWATGTPDR |
| | | FSGSGSGTDFTLTITRLEPEDFAVYYCQYYGTSPMYTFGQGTKVE |
| | | IKTTTPAPRPPTPAPTIASQPLSLRPEACRPAAGGAVHTRGLDFAC |
| | | DIYIWAPLAGTCGVLLLSLVITLYCKRGRKKLLYIFKQPFMRPVQ |
| | | TTQEEDGCSCRFPEEEEGGCELRVKFSRSADAPAYKQGQNQLYN |
| | | ELNLGRREEYDVLDKRRGRDPEMGGKPRRKNPQEGLYNELQKD |
| | | KMAEAYSEIGMKGERRRGKGHDGLYQGLSTATKDTYDALHMQ |
| | | ALPPR |
| BCMA_EBB- | 1598 | ATGGCCCTCCCTGTCACCGCCCTGCTGCTTCCGCTGGCTCTTC |
| C1978- | | TGCTCCACGCCGCTCGGCCCGAAGTGCAGCTGCTCGAAACCG |
| D4-nt | | GTGGAGGGCTGGTGCAGCCAGGGGGCTCCCTGAGGCTTTCAT |
| Full CART | | GCGCCGCTAGCGGATTCTCCTTCTCCTCTTACGCCATGTCGTG |
| | | GGTCCGCCAAGCCCCTGGAAAAGGCCTGGAATGGGTGTCCGC |
| | | GATTTCCGGGAGCGGAGGTTCGACCTATTACGCCGACTCCGT |
| | | GAAGGGCCGCTTTACCATCTCCCGGGATAACTCCAAGAACAC |
| | | TCTGTACCTCCAAATGAACTCGCTGAGAGCCGAGGACACCGC |
| | | CGTGTATTACTGCGCGAAGGCGCTGGTCGGCGCGACTGGGGC |
| | | ATTCGACATCTGGGGACAGGGAACTCTTGTGACCGTGTCGAG |
| | | CGGAGGCGGCGGCTCCGGCGGAGGAGGGAGCGGGGGCGGTG |
| | | GTTCCGAAATCGTGTTGACTCAGTCCCCGGGAACCCTGAGCTT |
| | | GTCACCCGGGGAGCGGGCCACTCTCTCCTGTCGCGCCTCCCA |
| | | ATCGCTCTCATCCAATTTCCTGGCCTGGTACCAGCAGAAGCCC |
| | | GGACAGGCCCCGGGCCTGCTCATCTACGGCGCTTCAAACTGG |
| | | GCAACGGGAACCCCTGATCGGTTCAGCGGAAGCGGATCGGGT |
| | | ACTGACTTTACCCTGACCATCACCAGACTGGAACCGGAGGAC |
| | | TTCGCCGTGTACTACTGCCAGTACTACGGCACCTCCCCCATGT |
| | | ACACATTCGGACAGGGTACCAAGGTCGAGATTAAGACCACTA |
| | | CCCCAGCACCGAGGCCACCCACCCCGGCTCCTACCATCGCCT |
| | | CCCAGCCTCTGTCCCTGCGTCCGGAGGCATGTAGACCCGCAG |
| | | CTGGTGGGGCCGTGCATACCCGGGGTCTTGACTTCGCCTGCG |
| | | ATATCTACATTTGGGCCCCTCTGGCTGGTACTTGCGGGGTCCT |
| | | GCTGCTTTCACTCGTGATCACTCTTTACTGTAAGCGCGGTCGG |
| | | AAGAAGCTGCTGTACATCTTTAAGCAACCCTTCATGAGGCCT |
| | | GTGCAGACTACTCAAGAGGAGGACGGCTGTTCATGCCGGTTC |
| | | CCAGAGGAGGAGGAAGGCGGCTGCGAACTGCGCGTGAAATT |
| | | CAGCCGCAGCGCAGATGCTCCAGCCTACAAGCAGGGGCAGA |
| | | ACCAGCTCTACAACGAACTCAATCTTGGTCGGAGAGAGGAGT |
| | | ACGACGTGCTGGACAAGCGGAGAGGACGGGACCCAGAAATG |
| | | GGCGGGAAGCCGCGCAGAAAGAATCCCCAAGAGGGCCTGTA |
| | | CAACGAGCTCCAAAAGGATAAGATGGCAGAAGCCTATAGCG |
| | | AGATTGGTATGAAAGGGGAACGCAGAAGAGGCAAAGGCCAC |
| | | GACGGACTGTACCAGGGACTCAGCACCGCCACCAAGGACACC |
| | | TATGACGCTCTTCACATGCAGGCCCTGCCGCCTCGG |

BCMA_EBB-C1980-A2

| | | |
|---|---|---|
| BCMA_EBB- | 1599 | EVQLLESGGGLVQPGGSLRLSCAASGFTFSSYAMSWVRQAPGK |
| C1980- | | GLEWVSAISGSGGSTYYADSVKGRFTISRDNSKNTLYLQMNSLR |
| A2-aa | | AEDTAVYYCVLWFGEGFDPWGQGTLVTVSSGGGGSGGGGSGG |
| ScFv | | GGSDIVLTQSPLSLPVTPGEPASISCRSSQSLLHSNGYNYLDWYL |
| domain | | QKPGQSPQLLIYLGSNRASGVPDRFSGSGSGTDFTLKISRVEAED |
| | | VGVYYCMQALQTPLTFGGGTKVDIK |
| BCMA_EBB- | 1600 | GAAGTGCAGCTGCTTGAGAGCGGTGGAGGTCTGGTGCAGCCC |
| C1980- | | GGGGGATCACTGCGCCTGTCCTGTGCCGCGTCCGGTTTCACTT |
| A2-nt | | TCTCCTCGTACGCCATGTCGTGGGTCAGACAGGCACCGGGAA |
| ScFv | | AGGGACTGGAATGGGTGTCAGCCATTTCGGGTTCGGGGGGCA |
| domain | | GCACCTACTACGCTGACTCCGTGAAGGGCCGGTTCACCATTTC |
| | | CCGCGACAACTCCAAGAACACCTTGTACCTCCAAATGAACTC |
| | | CCTGCGGGCCGAAGATACCGCCGTGTATTACTGCGTGCTGTG |
| | | GTTCGGAGAGGGATTCGACCCGTGGGGACAAGGAACACTCGT |
| | | GACTGTGTCATCCGGCGGAGGCGGCAGCGGTGGCGGCGGTTC |
| | | CGGCGGCGGCGGATCTGACATCGTGTTGACCCAGTCCCCTCT |
| | | GAGCCTGCCGGTCACTCCTGGCGAACCAGCCAGCATCTCCTG |
| | | CCGGTCGAGCCAGTCCCTCCTGCACTCCAATGGGTACAACTA |
| | | CCTCGATTGGTATCTGCAAAAGCCGGGCCAGAGCCCCCAGCT |
| | | GCTGATCTACCTTGGGTCAAACCGCGCTTCCGGGGTGCCTGAT |
| | | AGATTCTCCGGGTCCGGGAGCGGAACCGACTTTACCCTGAAA |
| | | ATCTCGAGGGTGGAGGCCGAGGACGTCGGAGTGTACTACTGC |
| | | ATGCAGGCGCTCCAGACTCCCCTGACCTTCGGAGGAGGAACG |
| | | AAGGTCGACATCAAGA |
| BCMA_EBB- | 1601 | EVQLLESGGGLVQPGGSLRLSCAASGFTFSSYAMSWVRQAPGK |
| C1980- | | GLEWVSAISGSGGSTYYADSVKGRFTISRDNSKNTLYLQMNSLR |
| A2-aa | | AEDTAVYYCVLWFGEGFDPWGQGTLVTVSS |
| VH | | |
| BCMA_EBB- | 1602 | DIVLTQSPLSLPVTPGEPASISCRSSQSLLHSNGYNYLDWYLQKP |
| C1980- | | GQSPQLLIYLGSNRASGVPDRFSGSGSGTDFTLKISRVEAEDVGV |
| A2-aa | | YYCMQALQTPLTFGGGTKVDIK |
| VL | | |
| BCMA_EBB- | 1603 | MALPVTALLLPLALLLHAARPEVQLLESGGGLVQPGGSLRLSCA |
| C1980- | | ASGFTFSSYAMSWVRQAPGKGLEWVSAISGSGGSTYYADSVKG |
| A2-aa | | RFTISRDNSKNTLYLQMNSLRAEDTAVYYCVLWFGEGFDPWGQ |
| Full CART | | GTLVTVSSGGGGSGGGGSGGGGSDIVLTQSPLSLPVTPGEPASIS |
| | | CRSSQSLLHSNGYNYLDWYLQKPGQSPQLLIYLGSNRASGVPDR |
| | | FSGSGSGTDFTLKISRVEAEDVGVYYCMQALQTPLTFGGGTKVD |
| | | IKTTTPAPRPPTPAPTIASQPLSLRPEACRPAAGGAVHTRGLDFAC |
| | | DIYIWAPLAGTCGVLLLSLVITLYCKRGRKKLLYIFKQPFMRPVQ |
| | | TTQEEDGCSCRFPEEEEGGCELRVKFSRSADAPAYKQGQNQLYN |
| | | ELNLGRREEYDVLDKRRGRDPEMGGKPRRKNPQEGLYNELQKD |
| | | KMAEAYSEIGMKGERRRGKGHDGLYQGLSTATKDTYDALHMQ |
| | | ALPPR |
| BCMA_EBB- | 1604 | ATGGCCCTCCCTGTCACCGCCCTGCTGCTTCCGCTGGCTCTTC |
| C1980- | | TGCTCCACGCCGCTCGGCCCGAAGTGCAGCTGCTTGAGAGCG |
| A2-nt | | GTGGAGGTCTGGTGCAGCCCGGGGGATCACTGCGCCTGTCCT |
| Full CART | | GTGCCGCGTCCGGTTTCACTTTCTCCTCGTACGCCATGTCGTG |
| | | GGTCAGACAGGCACCGGGAAAGGGACTGGAATGGGTGTCAG |
| | | CCATTTCGGGTTCGGGGGGCAGCACCTACTACGCTGACTCCGT |
| | | GAAGGGCCGGTTCACCATTTCCCGCGACAACTCCAAGAACAC |
| | | CTTGTACCTCCAAATGAACTCCCTGCGGGCCGAAGATACCGC |
| | | CGTGTATTACTGCGTGCTGTGGTTCGGAGAGGGATTCGACCC |
| | | GTGGGGACAAGGAACACTCGTGACTGTGTCATCCGGCGGAGG |
| | | CGGCAGCGGTGGCGGCGGTTCCGGCGGCGGCGGATCTGACAT |
| | | CGTGTTGACCCAGTCCCCTCTGAGCCTGCCGGTCACTCCTGGC |
| | | GAACCAGCCAGCATCTCCTGCCGGTCGAGCCAGTCCCTCCTG |
| | | CACTCCAATGGGTACAACTACCTCGATTGGTATCTGCAAAAG |
| | | CCGGGCCAGAGCCCCCAGCTGCTGATCTACCTTGGGTCAAAC |
| | | CGCGCTTCCGGGGTGCCTGATAGATTCTCCGGGTCCGGGAGC |
| | | GGAACCGACTTTACCCTGAAAATCTCGAGGGTGGAGGCCGAG |
| | | GACGTCGGAGTGTACTACTGCATGCAGGCGCTCCAGACTCCC |
| | | CTGACCTTCGGAGGAGGAACGAAGGTCGACATCAAGACCACT |
| | | ACCCCAGCACCGAGGCCACCCACCCCGGCTCCTACCATCGCC |
| | | TCCCAGCCTCTGTCCCTGCGTCCGGAGGCATGTAGACCCGCA |
| | | GCTGGTGGGGCCGTGCATACCCGGGGTCTTGACTTCGCCTGC |
| | | GATATCTACATTTGGGCCCCTCTGGCTGGTACTTGCGGGGTCC |
| | | TGCTGCTTTCACTCGTGATCACTCTTTACTGTAAGCGCGGTCG |
| | | GAAGAAGCTGCTGTACATCTTTAAGCAACCCTTCATGAGGCC |
| | | TGTGCAGACTACTCAAGAGGAGGACGGCTGTTCATGCCGGTT |
| | | CCCAGAGGAGGAGGAAGGCGGCTGCGAACTGCGCGTGAAAT |
| | | TCAGCCGCAGCGCAGATGCTCCAGCCTACAAGCAGGGGCAGA |
| | | ACCAGCTCTACAACGAACTCAATCTTGGTCGGAGAGAGGAGT |
| | | ACGACGTGCTGGACAAGCGGAGAGGACGGGACCCAGAAATG |
| | | GGCGGGAAGCCGCGCAGAAAGAATCCCCAAGAGGGCCTGTA |
| | | CAACGAGCTCCAAAAGGATAAGATGGCAGAAGCCTATAGCG |
| | | AGATTGGTATGAAAGGGGAACGCAGAAGAGGCAAAGGCCAC |
| | | GACGGACTGTACCAGGGACTCAGCACCGCCACCAAGGACACC |
| | | TATGACGCTCTTCACATGCAGGCCCTGCCGCCTCGG |

BCMA_EBB-C1981-C3

| | | |
|---|---|---|
| BCMA_EBB- | 1605 | QVQLVESGGGLVQPGGSLRLSCAASGFTFSSYAMSWVRQAPGK |
| C1981- | | GLEWVSAISGSGGSTYYADSVKGRFTISRDNSKNTLYLQMNSLR |
| C3-aa | | AEDTAVYYCAKVGYDSSGYYRDYYGMDVWGQGTTVTVSSGG |
| ScFv | | GGSGGGGSGGGGSEIVLTQSPGTLSLSPGERATLSCRASQSVSSS |
| domain | | YLAWYQQKPGQAPRLLIYGTSSRATGISDRFSGSGSGTDFTLTIS |
| | | RLEPEDFAVYYCQHYGNSPPKFTFGPGTKLEIK |
| BCMA_EBB- | 1606 | CAAGTGCAGCTCGTGGAGTCAGGCGGAGGACTGGTGCAGCCC |
| C1981- | | GGGGGCTCCCTGAGACTTTCCTGCGCGGCATCGGGTTTTACCT |
| C3-nt | | TCTCCTCCTATGCTATGTCCTGGGTGCGCCAGGCCCCGGGAAA |
| ScFv | | GGGACTGGAATGGGTGTCCGCAATCAGCGGTAGCGGGGGCTC |
| domain | | AACATACTACGCCGACTCCGTCAAGGGTCGCTTCACTATTTCC |
| | | CGGGACAACTCCAAGAATACCCTGTACCTCCAAATGAACAGC |
| | | CTCAGGGCCGAGGATACTGCCGTGTACTACTGCGCCAAAGTC |
| | | GGATACGATAGCTCCGGTTACTACCGGGACTACTACGGAATG |
| | | GACGTGTGGGGACAGGGCACCACCGTGACCGTGTCAAGCGGC |
| | | GGAGGCGGTTCAGGAGGGGGAGGCTCCGGCGGTGGAGGGTC |
| | | CGAAATCGTCCTGACTCAGTCGCCTGGCACTCTGTCGTTGTCC |
| | | CCGGGGGAGCGCGCTACCCTGTCGTGTCGGGCGTCGCAGTCC |
| | | GTGTCGAGCTCCTACCTCGCGTGGTACCAGCAGAAGCCCGGA |
| | | CAGGCCCCTAGACTTCTGATCTACGGCACTTCTTCACGCGCCA |
| | | CCGGGATCAGCGACAGGTTCAGCGGCTCCGGCTCCGGGACCG |
| | | ACTTCACCCTGACCATTAGCCGGCTGGAGCCTGAAGATTTCGC |
| | | CGTGTATTACTGCCAACACTACGGAAACTCGCCGCCAAAGTT |
| | | CACGTTCGGACCCGGAACCAAGCTGGAAATCAAG |
| BCMA_EBB- | 1607 | QVQLVESGGGLVQPGGSLRLSCAASGFTFSSYAMSWVRQAPGK |
| C1981- | | GLEWVSAISGSGGSTYYADSVKGRFTISRDNSKNTLYLQMNSLR |
| C3-aa | | AEDTAVYYCAKVGYDSSGYYRDYYGMDVWGQGTTVTVSS |
| VH | | |
| BCMA_EBB- | 1608 | EIVLTQSPGTLSLSPGERATLSCRASQSVSSSYLAWYQQKPGQAP |
| C1981- | | RLLIYGTSSRATGISDRFSGSGSGTDFTLTISRLEPEDFAVYYCQH |
| C3-aa | | YGNSPPKFTFGPGTKLEIK |
| VL | | |
| BCMA_EBB- | 1609 | MALPVTALLLPLALLLHAARPQVQLVESGGGLVQPGGSLRLSCA |
| C1981- | | ASGFTFSSYAMSWVRQAPGKGLEWVSAISGSGGSTYYADSVKG |
| C3-aa | | RFTISRDNSKNTLYLQMNSLRAEDTAVYYCAKVGYDSSGYYRD |
| Full CART | | YYGMDVWGQGTTVTVSSGGGGSGGGGSGGGGSEIVLTQSPGTL |
| | | SLSPGERATLSCRASQSVSSSYLAWYQQKPGQAPRLLIYGTSSRA |
| | | TGISDRFSGSGSGTDFTLTISRLEPEDFAVYYCQHYGNSPPKFTFG |
| | | PGTKLEIKTTTPAPRPPTPAPTIASQPLSLRPEACRPAAGGAVHTR |
| | | GLDFACDIYIWAPLAGTCGVLLLSLVITLYCKRGRKKLLYIFKQP |
| | | FMRPVQTTQEEDGCSCRFPEEEEGGCELRVKFSRSADAPAYKQG |
| | | QNQLYNELNLGRREEYDVLDKRRGRDPEMGGKPRRKNPQEGL |
| | | YNELQKDKMAEAYSEIGMKGERRRGKGHDGLYQGLSTATKDT |
| | | YDALHMQALPPR |
| BCMA_EBB- | 1610 | ATGGCCCTCCCTGTCACCGCCCTGCTGCTTCCGCTGGCTCTTC |
| C1981- | | TGCTCCACGCCGCTCGGCCCCAAGTGCAGCTCGTGGAGTCAG |
| C3-nt | | GCGGAGGACTGGTGCAGCCCGGGGGCTCCCTGAGACTTTCCT |
| Full CART | | GCGCGGCATCGGGTTTTACCTTCTCCTCCTATGCTATGTCCTG |
| | | GGTGCGCCAGGCCCCGGGAAAGGGACTGGAATGGGTGTCCGC |
| | | AATCAGCGGTAGCGGGGGCTCAACATACTACGCCGACTCCGT |
| | | CAAGGGTCGCTTCACTATTTCCCGGGACAACTCCAAGAATAC |
| | | CCTGTACCTCCAAATGAACAGCCTCAGGGCCGAGGATACTGC |
| | | CGTGTACTACTGCGCCAAAGTCGGATACGATAGCTCCGGTTA |
| | | CTACCGGGACTACTACGGAATGGACGTGTGGGGACAGGGCAC |
| | | CACCGTGACCGTGTCAAGCGGCGGAGGCGGTTCAGGAGGGG |
| | | GAGGCTCCGGCGGTGGAGGGTCCGAAATCGTCCTGACTCAGT |
| | | CGCCTGGCACTCTGTCGTTGTCCCCGGGGGAGCGCGCTACCCT |
| | | GTCGTGTCGGGCGTCGCAGTCCGTGTCGAGCTCCTACCTCGCG |
| | | TGGTACCAGCAGAAGCCCGGACAGGCCCCTAGACTTCTGATC |
| | | TACGGCACTTCTTCACGCGCCACCGGGATCAGCGACAGGTTC |
| | | AGCGGCTCCGGCTCCGGGACCGACTTCACCCTGACCATTAGC |
| | | CGGCTGGAGCCTGAAGATTTCGCCGTGTATTACTGCCAACACT |
| | | ACGGAAACTCGCCGCCAAAGTTCACGTTCGGACCCGGAACCA |
| | | AGCTGGAAATCAAGACCACTACCCCAGCACCGAGGCCACCCA |
| | | CCCCGGCTCCTACCATCGCCTCCCAGCCTCTGTCCCTGCGTCC |
| | | GGAGGCATGTAGACCCGCAGCTGGTGGGGCCGTGCATACCCG |
| | | GGGTCTTGACTTCGCCTGCGATATCTACATTTGGGCCCCTCTG |
| | | GCTGGTACTTGCGGGGTCCTGCTGCTTTCACTCGTGATCACTC |
| | | TTTACTGTAAGCGCGGTCGGAAGAAGCTGCTGTACATCTTTAA |
| | | GCAACCCTTCATGAGGCCTGTGCAGACTACTCAAGAGGAGGA |
| | | CGGCTGTTCATGCCGGTTCCCAGAGGAGGAGGAAGGCGGCTG |
| | | CGAACTGCGCGTGAAATTCAGCCGCAGCGCAGATGCTCCAGC |
| | | CTACAAGCAGGGGCAGAACCAGCTCTACAACGAACTCAATCT |
| | | TGGTCGGAGAGAGGAGTACGACGTGCTGGACAAGCGGAGAG |
| | | GACGGGACCCAGAAATGGGCGGGAAGCCGCGCAGAAAGAAT |
| | | CCCCAAGAGGGCCTGTACAACGAGCTCCAAAAGGATAAGATG |
| | | GCAGAAGCCTATAGCGAGATTGGTATGAAAGGGGAACGCAG |
| | | AAGAGGCAAAGGCCACGACGGACTGTACCAGGGACTCAGCA |
| | | CCGCCACCAAGGACACCTATGACGCTCTTCACATGCAGGCCC |
| | | TGCCGCCTCGG |

BCMA_EBB-C1978-G4

| | | |
|---|---|---|
| BCMA_EBB- | 1611 | EVQLVESGGGLVQPGGSLRLSCAASGFTFSSYAMSWVRQAPGK |
| C1978- | | GLEWVSAISGSGGSTYYADSVKGRFTISRDNSKNTLYLQMNSLR |
| G4-aa | | AEDTAVYYCAKMGWSSGYLGAFDIWGQGTTVTVSSGGGGSGG |
| ScFv | | GGSGGGGSEIVLTQSPGTLSLSPGERATLSCRASQSVASSFLAWY |
| domain | | QQKPGQAPRLLIYGASGRATGIPDRFSGSGSGTDFTLTISRLEPED |
| | | FAVYYCQHYGGSPRLTFGGGTKVDIK |
| BCMA_EBB- | 1612 | GAAGTCCAACTGGTGGAGTCCGGGGGAGGGCTCGTGCAGCCC |
| C1978- | | GGAGGCAGCCTTCGGCTGTCGTGCGCCGCCTCCGGGTTCACG |
| G4-nt | | TTCTCATCCTACGCGATGTCGTGGGTCAGACAGGCACCAGGA |
| ScFv | | AAGGGACTGGAATGGGTGTCCGCCATTAGCGGCTCCGGCGGT |
| domain | | AGCACCTACTATGCCGACTCAGTGAAGGGAAGGTTCACTATC |
| | | TCCCGCGACAACAGCAAGAACACCCTGTACCTCCAAATGAAC |
| | | TCTCTGCGGGCCGAGGATACCGCGGTGTACTATTGCGCCAAG |
| | | ATGGGTTGGTCCAGCGGATACTTGGGAGCCTTCGACATTTGG |
| | | GGACAGGGCACTACTGTGACCGTGTCCTCCGGGGGTGGCGGA |
| | | TCGGGAGGCGGCGGCTCGGGTGGAGGGGGTTCCGAAATCGTG |
| | | TTGACCCAGTCACCGGGAACCCTCTCGCTGTCCCCGGGAGAA |
| | | CGGGCTACACTGTCATGTAGAGCGTCCCAGTCCGTGGCTTCCT |
| | | CGTTCCTGGCCTGGTACCAGCAGAAGCCGGGACAGGCACCCC |
| | | GCCTGCTCATCTACGGAGCCAGCGGCCGGGCGACCGGCATCC |
| | | CTGACCGCTTCTCCGGTTCCGGCTCGGGCACCGACTTTACTCT |
| | | GACCATTAGCAGGCTTGAGCCCGAGGATTTTGCCGTGTACTA |
| | | CTGCCAACACTACGGGGGGAGCCCTCGCCTGACCTTCGGAGG |
| | | CGGAACTAAGGTCGATATCAAAA |
| BCMA_EBB- | 1613 | EVQLVESGGGLVQPGGSLRLSCAASGFTFSSYAMSWVRQAPGK |
| C1978- | | GLEWVSAISGSGGSTYYADSVKGRFTISRDNSKNTLYLQMNSLR |
| G4-aa | | AEDTAVYYCAKMGWSSGYLGAFDIWGQGTTVTVSS |
| VH | | |
| BCMA_EBB- | 1614 | EIVLTQSPGTLSLSPGERATLSCRASQSVASSFLAWYQQKPGQAP |
| C1978- | | RLLIYGASGRATGIPDRFSGSGSGTDFTLTISRLEPEDFAVYYCQH |
| G4-aa | | YGGSPRLTFGGGTKVDIK |
| VL | | |
| BCMA_EBB- | 1615 | MALPVTALLLPLALLLHAARPEVQLVESGGGLVQPGGSLRLSCA |
| C1978- | | ASGFTFSSYAMSWVRQAPGKGLEWVSAISGSGGSTYYADSVKG |
| G4-aa | | RFTISRDNSKNTLYLQMNSLRAEDTAVYYCAKMGWSSGYLGAF |
| Full CART | | DIWGQGTTVTVSSGGGGSGGGGSGGGGSEIVLTQSPGTLSLSPGE |
| | | RATLSCRASQSVASSFLAWYQQKPGQAPRLLIYGASGRATGIPD |
| | | RFSGSGSGTDFTLTISRLEPEDFAVYYCQHYGGSPRLTFGGGTKV |
| | | DIKTTTPAPRPPTPAPTIASQPLSLRPEACRPAAGGAVHTRGLDFA |
| | | CDIYIWAPLAGTCGVLLLSLVITLYCKRGRKKLLYIFKQPFMRPV |
| | | QTTQEEDGCSCRFPEEEEGGCELRVKFSRSADAPAYKQGQNQLY |
| | | NELNLGRREEYDVLDKRRGRDPEMGGKPRRKNPQEGLYNELQK |
| | | DKMAEAYSEIGMKGERRRGKGHDGLYQGLSTATKDTYDALHM |
| | | QALPPR |
| BCMA_EBB- | 1616 | ATGGCCCTCCCTGTCACCGCCCTGCTGCTTCCGCTGGCTCTTC |
| C1978- | | TGCTCCACGCCGCTCGGCCCGAAGTCCAACTGGTGGAGTCCG |
| G4-nt | | GGGGAGGGCTCGTGCAGCCCGGAGGCAGCCTTCGGCTGTCGT |
| Full CART | | GCGCCGCCTCCGGGTTCACGTTCTCATCCTACGCGATGTCGTG |
| | | GGTCAGACAGGCACCAGGAAAGGGACTGGAATGGGTGTCCG |
| | | CCATTAGCGGCTCCGGCGGTAGCACCTACTATGCCGACTCAG |
| | | TGAAGGGAAGGTTCACTATCTCCCGCGACAACAGCAAGAACA |
| | | CCCTGTACCTCCAAATGAACTCTCTGCGGGCCGAGGATACCG |
| | | CGGTGTACTATTGCGCCAAGATGGGTTGGTCCAGCGGATACT |
| | | TGGGAGCCTTCGACATTTGGGGACAGGGCACTACTGTGACCG |
| | | TGTCCTCCGGGGGTGGCGGATCGGGAGGCGGCGGCTCGGGTG |
| | | GAGGGGGTTCCGAAATCGTGTTGACCCAGTCACCGGGAACCC |
| | | TCTCGCTGTCCCCGGGAGAACGGGCTACACTGTCATGTAGAG |
| | | CGTCCCAGTCCGTGGCTTCCTCGTTCCTGGCCTGGTACCAGCA |
| | | GAAGCCGGGACAGGCACCCCGCCTGCTCATCTACGGAGCCAG |
| | | CGGCCGGGCGACCGGCATCCCTGACCGCTTCTCCGGTTCCGG |
| | | CTCGGGCACCGACTTTACTCTGACCATTAGCAGGCTTGAGCCC |
| | | GAGGATTTTGCCGTGTACTACTGCCAACACTACGGGGGGAGC |
| | | CCTCGCCTGACCTTCGGAGGCGGAACTAAGGTCGATATCAAA |
| | | ACCACTACCCCAGCACCGAGGCCACCCACCCCGGCTCCTACC |
| | | ATCGCCTCCCAGCCTCTGTCCCTGCGTCCGGAGGCATGTAGAC |
| | | CCGCAGCTGGTGGGGCCGTGCATACCCGGGGTCTTGACTTCG |
| | | CCTGCGATATCTACATTTGGGCCCCTCTGGCTGGTACTTGCGG |
| | | GGTCCTGCTGCTTTCACTCGTGATCACTCTTTACTGTAAGCGC |
| | | GGTCGGAAGAAGCTGCTGTACATCTTTAAGCAACCCTTCATG |
| | | AGGCCTGTGCAGACTACTCAAGAGGAGGACGGCTGTTCATGC |
| | | CGGTTCCCAGAGGAGGAGGAAGGCGGCTGCGAACTGCGCGT |
| | | GAAATTCAGCCGCAGCGCAGATGCTCCAGCCTACAAGCAGGG |
| | | GCAGAACCAGCTCTACAACGAACTCAATCTTGGTCGGAGAGA |
| | | GGAGTACGACGTGCTGGACAAGCGGAGAGGACGGGACCCAG |
| | | AAATGGGCGGGAAGCCGCGCAGAAAGAATCCCCAAGAGGGC |
| | | CTGTACAACGAGCTCCAAAAGGATAAGATGGCAGAAGCCTAT |
| | | AGCGAGATTGGTATGAAAGGGGAACGCAGAAGAGGCAAAGG |
| | | CCACGACGGACTGTACCAGGGACTCAGCACCGCCACCAAGGA |
| | | CACCTATGACGCTCTTCACATGCAGGCCCTGCCGCCTCGG |

TABLE 4E
Additional exemplary BCMA CAR sequences

| | | SEQ |
|---|---|---|
| Name | Sequence | ID NO: |
| A7D12.2 | QIQLVQSGPDLKKPGETVKLSCKASGYTFTNFGMNWVKQAPGK | 1617 |
| VH | GFKWMAWINTYTGESYFADDFKGRFAFSVETSATTAYLQINNLK | |
| | TEDTATYFCARGEIYYGYDGGFAYWGQGTLVTVSA | |
| A7D12.2 | DVVMTQSHRFMSTSVGDRVSITCRASQDVNTAVSWYQQKPGQS | 1618 |
| VL | PKLLIFSASYRYTGVPDRFTGSGSGADFTLTISSVQAEDLAVYYCQ | |
| | QHYSTPWTFGGGTKLDIK | |
| A7D12.2 | QIQLVQSGPDLKKPGETVKLSCKASGYTFTNFGMNWVKQAPGK | 1619 |
| scFv | GFKWMAWINTYTGESYFADDFKGRFAFSVETSATTAYLQINNLK | |
| domain | TEDTATYFCARGEIYYGYDGGFAYWGQGTLVTVSAGGGGSGGG | |
| | GSGGGGSDVVMTQSHRFMSTSVGDRVSITCRASQDVNTAVSWY | |
| | QQKPGQSPKLLIFSASYRYTGVPDRFTGSGSGADFTLTISSVQAED | |
| | LAVYYCQQHYSTPWTFGGGTKLDIK | |
| A7D12.2 | QIQLVQSGPDLKKPGETVKLSCKASGYTFTNFGMNWVKQAPGK | 1620 |
| Full | GFKWMAWINTYTGESYFADDFKGRFAFSVETSATTAYLQINNLK | |
| CART | TEDTATYFCARGEIYYGYDGGFAYWGQGTLVTVSAGGGGSGGG | |
| | GSGGGGSDVVMTQSHRFMSTSVGDRVSITCRASQDVNTAVSWY | |
| | QQKPGQSPKLLIFSASYRYTGVPDRFTGSGSGADFTLTISSVQAED | |
| | LAVYYCQQHYSTPWTFGGGTKLDIKTTTPAPRPPTPAPTIASQPLS | |
| | LRPEACRPAAGGAVHTRGLDFACDIYIWAPLAGTCGVLLLSLVIT | |
| | LYCKRGRKKLLYIFKQPFMRPVQTTQEEDGCSCRFPEEEEGGCEL | |
| | RVKFSRSADAPAYKQGQNQLYNELNLGRREEYDVLDKRRGRDP | |
| | EMGGKPRRKNPQEGLYNELQKDKMAEAYSEIGMKGERRRGKG | |
| | HDGLYQGLSTATKDTYDALHMQALPPR | |
| C11D5.3 | QIQLVQSGPELKKPGETVKISCKASGYTFTDYSINWVKRAPGKGL | 1621 |
| VH | KWMGWINTETREPAYAYDFRGRFAFSLETSASTAYLQINNLKYE | |
| | DTATYFCALDYSYAMDYWGQGTSVTVSS | |
| C11D5.3 | DIVLTQSPASLAMSLGKRATISCRASESVSVIGAHLIHWYQQKPG | 1622 |
| VL | QPPKLLIYLASNLETGVPARFSGSGSGTDFTLTIDPVEEDDVAIYS | |
| | CLQSRIFPRTFGGGTKLEIK | |
| C11D5.3 | QIQLVQSGPELKKPGETVKISCKASGYTFTDYSINWVKRAPGKGL | 1623 |
| scFv | KWMGWINTETREPAYAYDFRGRFAFSLETSASTAYLQINNLKYE | |
| domain | DTATYFCALDYSYAMDYWGQGTSVTVSSGGGGSGGGGSGGGG | |
| | SQIQLVQSGPELKKPGETVKISCKASGYTFTDYSINWVKRAPGKG | |
| | LKWMGWINTETREPAYAYDFRGRFAFSLETSASTAYLQINNLKY | |
| | EDTATYFCALDYSYAMDYWGQGTSVTVSS | |
| C11D5.3 | QIQLVQSGPELKKPGETVKISCKASGYTFTDYSINWVKRAPGKGL | 1624 |
| Full | KWMGWINTETREPAYAYDFRGRFAFSLETSASTAYLQINNLKYE | |
| CART | DTATYFCALDYSYAMDYWGQGTSVTVSSGGGGSGGGGSGGGG | |
| | SQIQLVQSGPELKKPGETVKISCKASGYTFTDYSINWVKRAPGKG | |
| | LKWMGWINTETREPAYAYDFRGRFAFSLETSASTAYLQINNLKY | |
| | EDTATYFCALDYSYAMDYWGQGTSVTVSSTTTPAPRPPTPAPTIA | |
| | SQPLSLRPEACRPAAGGAVHTRGLDFACDIYIWAPLAGTCGVLLL | |
| | SLVITLYCKRGRKKLLYIFKQPFMRPVQTTQEEDGCSCRFPEEEEG | |
| | GCELRVKFSRSADAPAYKQGQNQLYNELNLGRREEYDVLDKRR | |
| | GRDPEMGGKPRRKNPQEGLYNELQKDKMAEAYSEIGMKGERRR | |
| | GKGHDGLYQGLSTATKDTYDALHMQALPPR | |
| C12A3.2 | QIQLVQSGPELKKPGETVKISCKASGYTFRHYSMNWVKQAPGKG | 1625 |
| VH | LKWMGRINTESGVPIYADDFKGRFAFSVETSASTAYLVINNLKDE | |
| | DTASYFCSNDYLYSLDFWGQGTALTVSS | |
| C12A3.2 | DIVLTQSPPSLAMSLGKRATISCRASESVTILGSHLIYWYQQKPGQ | 1626 |
| VL | PPTLLIQLASNVQTGVPARFSGSGSRTDFTLTIDPVEEDDVAVYYC | |
| | LQSRTIPRTFGGGTKLEIK | |
| C12A3.2 | QIQLVQSGPELKKPGETVKISCKASGYTFRHYSMNWVKQAPGKG | 1627 |
| scFv | LKWMGRINTESGVPIYADDFKGRFAFSVETSASTAYLVINNLKDE | |
| domain | DTASYFCSNDYLYSLDFWGQGTALTVSSGGGGSGGGGSGGGGS | |
| | DIVLTQSPPSLAMSLGKRATISCRASESVTILGSHLIYWYQQKPGQ | |
| | PPTLLIQLASNVQTGVPARFSGSGSRTDFTLTIDPVEEDDVAVYYC | |
| | LQSRTIPRTFGGGTKLEIK | |
| C12A3.2 | QIQLVQSGPELKKPGETVKISCKASGYTFRHYSMNWVKQAPGKG | 1628 |
| Full | LKWMGRINTESGVPIYADDFKGRFAFSVETSASTAYLVINNLKDE | |
| CART | DTASYFCSNDYLYSLDFWGQGTALTVSSGGGGSGGGGSGGGGS | |
| | DIVLTQSPPSLAMSLGKRATISCRASESVTILGSHLIYWYQQKPGQ | |
| | PPTLLIQLASNVQTGVPARFSGSGSRTDFTLTIDPVEEDDVAVYYC | |
| | LQSRTIPRTFGGGTKLEIKTTTPAPRPPTPAPTIASQPLSLRPEACRP | |
| | AAGGAVHTRGLDFACDIYIWAPLAGTCGVLLLSLVITLYCKRGR | |
| | KKLLYIFKQPFMRPVQTTQEEDGCSCRFPEEEEGGCELRVKFSRS | |
| | ADAPAYKQGQNQLYNELNLGRREEYDVLDKRRGRDPEMGGKP | |
| | RRKNPQEGLYNELQKDKMAEAYSEIGMKGERRRGKGHDGLYQ | |
| | GLSTATKDTYDALHMQALPPR | |
| C13F12.1 | QIQLVQSGPELKKPGETVKISCKASGYTFTHYSMNWVKQAPGKG | 1629 |
| VH | LKWMGRINTETGEPLYADDFKGRFAFSLETSASTAYLVINNLKNE | |
| | DTATFFCSNDYLYSCDYWGQGTTLTVSS | |
| C13F12.1 | DIVLTQSPPSLAMSLGKRATISCRASESVTILGSHLIYWYQQKPGQ | 1630 |
| VL | PPTLLIQLASNVQTGVPARFSGSGSRTDFTLTIDPVEEDDVAVYYC | |
| | LQSRTIPRTFGGGTKLEIK | |
| C13F12.1 | QIQLVQSGPELKKPGETVKISCKASGYTFTHYSMNWVKQAPGKG | 1631 |
| scFv | LKWMGRINTETGEPLYADDFKGRFAFSLETSASTAYLVINNLKNE | |
| domain | DTATFFCSNDYLYSCDYWGQGTTLTVSSGGGGSGGGGSGGGGS | |
| | DIVLTQSPPSLAMSLGKRATISCRASESVTILGSHLIYWYQQKPGQ | |
| | PPTLLIQLASNVQTGVPARFSGSGSRTDFTLTIDPVEEDDVAVYYC | |
| | LQSRTIPRTFGGGTKLEIK | |
| C13F12.1 | QIQLVQSGPELKKPGETVKISCKASGYTFTHYSMNWVKQAPGKG | 1632 |
| Full | LKWMGRINTETGEPLYADDFKGRFAFSLETSASTAYLVINNLKNE | |
| CART | DTATFFCSNDYLYSCDYWGQGTTLTVSSGGGGSGGGGSGGGGS | |
| | DIVLTQSPPSLAMSLGKRATISCRASESVTILGSHLIYWYQQKPGQ | |
| | PPTLLIQLASNVQTGVPARFSGSGSRTDFTLTIDPVEEDDVAVYYC | |
| | LQSRTIPRTFGGGTKLEIKTTTPAPRPPTPAPTIASQPLSLRPEACRP | |
| | AAGGAVHTRGLDFACDIYIWAPLAGTCGVLLLSLVITLYCKRGR | |
| | KKLLYIFKQPFMRPVQTTQEEDGCSCRFPEEEEGGCELRVKFSRS | |
| | ADAPAYKQGQNQLYNELNLGRREEYDVLDKRRGRDPEMGGKP | |
| | RRKNPQEGLYNELQKDKMAEAYSEIGMKGERRRGKGHDGLYQ | |
| | GLSTATKDTYDALHMQALPPR | |

TABLE 4F
Amino acid sequences of exemplary BCMA binding domains

| | | |
|---|---|---|
| ER26 | | |
| SEQ ID NO: | J6M0 VH | QVQLVQSGAEVKKPGSSVKVSCKASGGTFSNYWMHW |
| 1635 | | VRQAPGQGLEWMGATYRGHSDTYYNQKFKGRVTITA |
| | | DKSTSTAYMELSSLRSEDTAVYYCARGAIYDGYDVLD |
| | | NWGQGTLVTVSS |
| SEQ ID NO: | J6M0 VL | DIQMTQSPSSLSASVGDRVTITCSASQDISNYLNWYQQ |
| 1636 | | KPGKAPKLLIYYTSNLHSGVPSRFSGSGSGTDFTLTISSL |
| | | QPEDFATYYCQQYRKLPWTFGQGTKLEIKR |
| SEQ ID NO: | Anti-BCMA | QVQLVQSGAEVKKPGSSVKVSCKASGGTFSNYWMHW |
| 1637 | heavy chain | VRQAPGQGLEWMGATYRGHSDTYYNQKFKGRVTITA |
| | of ER26 | DKSTSTAYMELSSLRSEDTAVYYCARGAIYNGYDVLD |
| | | NWGQGTLVTVSSASTKGPSVFPLAPSSKSTSGGTAALG |
| | | CLVKDYFPEPVTVSWNSGALTSGVHTFPAVLQSSGLYS |
| | | LSSVVTVPSSSLGTQTYICNVNHKPSNTKVDKRVEPKSC |
| | | DKTHTCPPCPAPELLGGPSVFLFPPKPKDTLMISRTPEVT |
| | | CVVVAVSHEDPEVKFNWYVDGVEVHNAKTKPREEQY |
| | | NSTYRVVSVLTVLHQDWLNGKEYKCKVSNKALAAPIE |
| | | KTISKAKGQPREPQVCTLPPSREEMTKNQVSLSCAVKG |
| | | FYPSDIAVEWESNGQPENNYKTTPPVLDSDGSFFLVSKL |
| | | TVDKSRWQQGNVFSCSVMHEALHNHYTQKSLSLSPGX, |
| | | wherein X is K or absent |
| SEQ ID NO: | Anti-BCMA | DIQMTQSPSSLSASVGDRVTITCSASQDISNYLNWYQQ |
| 1638 | light chain of | KPGKAPKLLIYYTSNLHSGVPSRFSGSGSGTDFTLTISSL |
| | ER26 | QPEDFATYYCQQYRKLPWTFGQGTKLEIKRTVAAPSVF |
| | | IFPPSDEQLKSGTASVVCLLNNFYPREAKVQWKVDNAL |
| | | QSGNSQESVTEQDSKDSTYSLSSTLTLSKADYEKHKVY |
| | | ACEVTHQGLSSPVTKSFNRGEC |
| BQ76 | | |
| SEQ ID NO: | 17A5 VH | EVQLLESGGGLVQPGGSLRLSCAASGFTFSSYAMSWVR |
| 1639 | | QAPGKGLEWVSAISGSGGSTYYADSVKGRFTISRDNSK |
| | | NTLYLQMNSLRAEDTAVYYCAKVAPYFAPFDYWGQG |
| | | TLVTVSS |
| SEQ ID NO: | 17A5 VL | EIVLTQSPGTLSLSPGERATLSCRASQSVSSSYLAWYQQ |
| 1640 | | KPGQAPRLLIYGASSRATGIPDRFSGSGSGTDFTLTISRL |
| | | EPEDFAVYYCQQYGNPPLYTFGQGTKVEIK |
| SEQ ID NO: | Anti-BCMA | EVQLLESGGGLVQPGGSLRLSCAASGFTFSSYAMSWVR |
| 1641 | heavy chain | QAPGKGLEWVSAISGSGGSTYYADSVKGRFTISRDNSK |
| | of BQ76 | NTLYLQMNSLRAEDTAVYYCAKVAPYFAPFDYWGQG |
| | | TLVTVSSASTKGPSVFPLAPSSKSTSGGTAALGCLVKDY |
| | | FPEPVTVSWNSGALTSGVHTFPAVLQSSGLYSLSSVVT |
| | | VPSSSLGTQTYICNVNHKPSNTKVDKRVEPKSCDKTHT |
| | | CPPCPAPELLGGPSVFLFPPKPKDTLMISRTPEVTCVVV |
| | | DVSHEDPEVKFNWYVDGVEVHNAKTKPREEQYASTY |
| | | RVVSVLTVLHQDWLNGKEYKCKVSNKALPAPIEKTISK |
| | | AKGQPREPQVCTLPPSREEMTKNQVSLSCAVKGFYPSD |
| | | IAVEWESNGQPENNYKTTPPVLDSDGSFFLVSKLTVDK |
| | | SRWQQGNVFSCSVMHEALHNHYTQKSLSLSPGX, |
| | | wherein X is K or absent |
| SEQ ID NO: | Anti-BCMA | EIVLTQSPGTLSLSPGERATLSCRASQSVSSSYLAWYQQ |
| 1642 | light chain of | KPGQAPRLLIYGASSRATGIPDRFSGSGSGTDFTLTISRL |
| | BQ76 | EPEDFAVYYCQQYGNPPLYTFGQGTKVEIKRTVAAPSV |
| | | FIFPPSDEQLKSGTASVVCLLNNFYPREAKVQWKVDNA |
| | | LQSGNSQESVTEQDSKDSTYSLSSTLTLSKADYEKHKV |
| | | YACEVTHQGLSSPVTKSFNRGEC |
| BU76 | | |
| SEQ ID NO: | C11D5 VH | QIQLVQSGPELKKPGETVKISCKASGYTFTDYSINWVKR |
| 1643 | | APGKGLKWMGWINTETREPAYAYDFRGRFAFSLETSA |
| | | STAYLQINNLKYEDTATYFCALDYSYAMDYWGQGTSV |
| | | TVSS |
| SEQ ID NO: | C11D5 VL | DIVLTQSPPSLAMSLGKRATISCRASESVTILGSHLIHWY |
| 1644 | | QQKPGQPPTLLIQLASNVQTGVPARFSGSGSRTDFTLTI |
| | | DPVEEDDVAVYYCLQSRTIPRTFGGGTKLEIK |
| SEQ ID NO: | Anti-BCMA | QIQLVQSGPELKKPGETVKISCKASGYTFTDYSINWVKR |
| 1645 | heavy chain | APGKGLKWMGWINTETREPAYAYDFRGRFAFSLETSA |
| | of BU76 | STAYLQINNLKYEDTATYFCALDYSYAMDYWGQGTSV |
| | | TVSSASTKGPSVFPLAPSSKSTSGGTAALGCLVKDYFPE |
| | | PVTVSWNSGALTSGVHTFPAVLQSSGLYSLSSVVTVPSS |
| | | SLGTQTYICNVNHKPSNTKVDKRVEPKSCDKTHTCPPC |
| | | PAPELLGGPSVFLFPPKPKDTLMISRTPEVTCVVVDVSH |
| | | EDPEVKFNWYVDGVEVHNAKTKPREEQYASTYRVVS |
| | | VLTVLHQDWLNGKEYKCKVSNKALPAPIEKTISKAKG |
| | | QPREPQVCTLPPSREEMTKNQVSLSCAVKGFYPSDIAVE |
| | | WESNGQPENNYKTTPPVLDSDGSFFLVSKLTVDKSRW |
| | | QQGNVFSCSVMHEALHNHYTQKSLSLSPGX, wherein X |
| | | is K or absent |
| SEQ ID NO: | Anti-BCMA | DIVLTQSPASLAMSLGKRATISCRASESVSVIGAHLIHW |
| 1646 | light chain of | YQQKPGQPPKLLIYLASNLETGVPARFSGSGSGTDFTLT |
| | BU76 | IDPVEEDDVAIYSCLQSRlFPRTFGGGTKLEIKRTVAAPS |
| | | VFIFPPSDEQLKSGTASVVCLLNNFYPREAKVQWKVDN |
| | | ALQSGNSQESVTEQDSKDSTYSLSSTLTLSKADYEKHK |
| | | VYACEVTHQGLSSPVTKSFNRGEC |
| EE11 | | |
| SEQ ID NO: | 83A10 VH | EVQLLESGGGLVQPGGSLRLSCAASGFTFSSYAMSWVR |
| 1647 | | QAPGKGLEWVSAISGSGGSTYYADSVKGRFTISRDNSK |
| | | NTLYLQMNSLRAEDTAVYYCAKVLGWFDYWGQGTLV |
| | | TVSS |
| SEQ ID NO: | 83A10 VL | EIVLTQSPGTLSLSPGERATLSCRASQSVSSSYLAWYQQ |
| 1648 | | KPGQAPRLLIYGASSRATGIPDRFSGSGSGTDFTLTISRL |
| | | EPEDFAVYYCQQYGYPPDFTFGQGTKVEIK |
| SEQ ID NO: | Anti-BCMA | EVQLLESGGGLVQPGGSLRLSCAASGFTFSSYAMSWVR |
| 1649 | scFv-Fc of | QAPGKGLEWVSAISGSGGSTYYADSVKGRFTISRDNSK |
| | EE11 | NTLYLQMNSLRAEDTAVYYCAKVLGWFDYWGQGTLV |
| | | TVSSGGGGSGGGGSGGGGSGGGGSEIVLTQSPGTLSLSP |
| | | GERATLSCRASQSVSSSYLAWYQQKPGQAPRLLIYGAS |
| | | SRATGIPDRFSGSGSGTDFTLTISRLEPEDFAVYYCQQY |
| | | GYPPDFTFGQGTKVEIKGGGGSDKTHTCPPCPAPELLG |
| | | GPSVFLFPPKPKDTLMISRTPEVTCVVVAVSHEDPEVKF |
| | | NWYVDGVEVHNAKTKPREEQYNSTYRVVSVLTVLHQ |
| | | DWLNGKEYKCKVSNKALAAPIEKTISKAKGQPREPQV |
| | | YTLPPCRDELTKNQVSLWCLVKGFYPSDIAVEWESNGQ |
| | | PENNYKTTPPVLDSDGSFFLYSKLTVDKSRWQQGNVFS |
| | | CSVMHEALHNHYTQKSLSLSPGX, wherein X is K or |
| | | absent |
| EM90 | | |
| SEQ ID NO: | Comment | QAVVTQEPSLTVSPGGTVTLTCGSSTGAVTTSNYANW |
| 1650 | light chain of | VQEKPGQAFRGLIGGTNKRAPGTPARFSGSLLGGKAAL |
| | EM90 | TLSGAQPEDEAEYYCALWYSNLWVFGGGTKLTVLGQP |
| | | KAAPSVTLFPPSSEELQANKATLVCLISDFYPGAVTVA |
| | | WKADSSPVKAGVETTTPSKQSNNKYAASSYLSLTPEQ |
| | | WKSHRSYSCQVTHEGSTVEKTVAPTECS |
| SEQ ID NO: | Anti-BCMA | EVQLVESGGGLVKPGGSLRLSCAASGFTFSNSGMIWVR |
| 1651 | heavy chain | QAPGKGLEWVGHIRSKTDGGTTDYAAPVKGRFTISRD |
| | of EM90 | DSKNTLYLQMNSLKTEDTAVYYCTTGGSGSFDYWGQ |
| | | GTLVTVSSASTKGPSVFPLAPSSKSTSGGTAALGCLVKD |
| | | YFPEPVTVSWNSGALTSGVHTFPAVLQSSGLYSLSSVV |
| | | TVPSSSLGTQTYICNVNHKPSNTKVDKRVEPKSCDKTH |
| | | TCPPCPAPEAAGGPSVFLFPPKPKDTLMISRTPEVTCVV |
| | | VDVSHEDPEVKFNWYVDGVEVHNAKTKPREEQYNST |
| | | YRVVSVLTVLHQDWLNGKEYKCKVSNKALPAPIEKTIS |
| | | KAKGQPREPQVCTLPPSREEMTKNQVSLSCAVKGFYPS |
| | | DIAVEWESNGQPENNYKTTPPVLDSDGSFFLVSKLTVD |
| | | KSRWQQGNVFSCSVMHEALHNHYTQKSLSLSPGX, |
| | | wherein X is K or absent |

TABLE 4G
Heavy Chain Variable Domain CDRs according to the
Kabat numbering scheme (Kabat et al. (1991), “Sequences
of Proteins of Immunological Interest,” 5th Ed.
Public Health Service, National Institutes of Health,
Bethesda, MD)

| Candidate | HCDR1 | ID | HCDR2 | ID | HCDR3 | ID |
|---|---|---|---|---|---|---|
| 139109 | NHGMS | 1652 | GIVYSGSTYYAA | 1701 | HGGESDV | 1741 |
| | | | SVKG | | | |
| 139103 | NYAMS | 1653 | GISRSGENTYYA | 1702 | SPAHYYGGMDV | 1742 |
| | | | DSVKG | | | |
| 139105 | DYAM | 1654 | GISWNSGSIGYA | 1703 | HSFLAY | 1743 |
| | | | DSVKG | | | |
| 139111 | NHGMS | 1655 | GIVYSGSTYYAA | 1704 | HGGESDV | 1744 |
| | | | SVKG | | | |
| 139100 | NFGIN | 1656 | WINPKNNNTNY | 1705 | GPYYYQSYMDV | 1745 |
| | | | AQKFQG | | | |
| 139101 | SDAMT | 1657 | VISGSGGTTYYA | 1706 | LDSSGYYYARGP | 1746 |
| | | | DSVKG | | RY | |
| 139102 | NYGIT | 1658 | WISAYNGNTNY | 1707 | GPYYYYMDV | 1747 |
| | | | AQKFQG | | | |
| 139104 | NHGMS | 1659 | GIVYSGSTYYAA | 1708 | HGGESDV | 1748 |
| | | | SVKG | | | |
| 139106 | NHGMS | 1670 | GIVYSGSTYYAA | 1709 | HGGESDV | 1749 |
| | | | SVKG | | | |
| 139107 | NHGMS | 1671 | GIVYSGSTYYAA | 1710 | HGGESDV | 1750 |
| | | | SVKG | | | |
| 139108 | DYYMS | 1672 | YISSSGSTIYYAD | 1711 | ESGDGMDV | 1751 |
| | | | SVKG | | | |
| 139110 | DYYMS | 1672 | YISSSGNTIYYAD | 1712 | STMVREDY | 1752 |
| | | | SVKG | | | |
| 139112 | NHGMS | 1673 | GIVYSGSTYYAA | 1713 | HGGESDV | 1753 |
| | | | SVKG | | | |
| 139113 | NHGMS | 1674 | GIVYSGSTYYAA | 1714 | HGGESDV | 1754 |
| | | | SVKG | | | |
| 139114 | NHGMS | 1675 | GIVYSGSTYYAA | 1715 | HGGESDV | 1755 |
| | | | SVKG | | | |
| 149362 | SSYYY | 1676 | SIYYSGSAYYNP | 1716 | HWQEWPDAFDI | 1756 |
| | WG | | SLKS | | | |
| 149363 | TSGMC | 1677 | RIDWDEDKFYST | 1717 | SGAGGTSATAFDI | 1757 |
| | VS | | SLKT | | | |
| 149364 | SYSMN | 1678 | SISSSSSYIYYAD | 1718 | TIAAVYAFDI | 1758 |
| | | | SVKG | | | |
| 149365 | DYYMS | 1679 | YISSSGSTIYYAD | 1719 | DLRGAFDI | 1759 |
| | | | SVKG | | | |
| 149366 | SHYIH | 1680 | MINPSGGVTAYS | 1720 | EGSGSGWYFDF | 1760 |
| | | | QTLQG | | | |
| 149367 | SGGYY | 1681 | YIYYSGSTYYNP | 1721 | AGIAARLRGAFDI | 1761 |
| | WS | | SLKS | | | |
| 149368 | SYAIS | 1682 | GIIPIFGTANYAQ | 1722 | RGGYQLLRWDV | 1762 |
| | | | KFQG | | GLLRSAFDI | |
| 149369 | SNSAA | 1683 | RTYYRSKWYSF | 1723 | SSPEGLFLYWFDP | 1763 |
| | WN | | YAISLKS | | | |
| BCMA_EBB- | SYAMS | 1684 | AISGSGGSTYYA | 1724 | VEGSGSLDY | 1764 |
| C1978- | | | DSVKG | | | |
| A4 | | | | | | |
| BCMA_EBB- | RYPMS | 1685 | GISDSGVSTYYA | 1725 | RAGSEASDI | 1765 |
| C1978- | | | DSAKG | | | |
| G1 | | | | | | |
| BCMA_EBB- | SYAMS | 1686 | AISGSGGSTYYA | 1726 | ATYKRELRYYY | 1766 |
| C1979- | | | DSVKG | | GMDV | |
| C1 | | | | | | |
| BCMA_EBB- | SYAMS | 1687 | AISGSGGSTYYA | 1727 | ATYKRELRYYY | 1767 |
| C1978- | | | DSVKG | | GMDV | |
| C7 | | | | | | |
| BCMA_EBB- | DYAMH | 1688 | GISWNSGSIGYA | 1728 | VGKAVPDV | 1768 |
| C1978- | | | DSVKG | | | |
| D10 | | | | | | |
| BCMA_EBB- | DYAMH | 1689 | SINWKGNSLAY | 1729 | HQGVAYYNYAM | 1769 |
| C1979- | | | GDSVKG | | DV | |
| C12 | | | | | | |
| BCMA_EBB- | SYAMS | 1690 | AISGSGGSTYYA | 1730 | VVRDGMDV | 1770 |
| C1980- | | | DSVKG | | | |
| G4 | | | | | | |
| BCMA_EBB- | SYAMS | 1691 | AISGSGGSTYYA | 1731 | IPQTGTFDY | 1771 |
| C1980- | | | DSVKG | | | |
| D2 | | | | | | |
| BCMA_EBB- | SYAMS | 1692 | AISGSGGSTYYA | 1732 | ANYKRELRYYY | 1772 |
| C1978- | | | DSVKG | | GMDV | |
| A10 | | | | | | |
| BCMA_EBB- | SYAMS | 1693 | AISGSGGSTYYA | 1733 | ALVGATGAFDI | 1773 |
| C1978- | | | DSVKG | | | |
| D4 | | | | | | |
| BCMA_EBB- | SYAMS | 1694 | AISGSGGSTYYA | 1734 | WFGEGFDP | 1774 |
| C1980- | | | DSVKG | | | |
| A2 | | | | | | |
| BCMA_EBB- | SYAMS | 1695 | AISGSGGSTYYA | 1735 | VGYDSSGYYRD | 1775 |
| C1981- | | | DSVKG | | YYGMDV | |
| C3 | | | | | | |
| BCMA_EBB- | SYAMS | 1696 | AISGSGGSTYYA | 1736 | MGWSSGYLGAF | 1776 |
| C1978- | | | DSVKG | | DI | |
| G4 | | | | | | |
| A7D12.2 | NFGMN | 1697 | WINTYTGESYFA | 1737 | GEIYYGYDGGFAY | 1777 |
| | | | DDFKG | | | |
| C11D5.3 | DYSIN | 1698 | WINTETREPAYA | 1738 | DYSYAMDY | 1778 |
| | | | YDFRG | | | |
| C12A3.2 | HYSMN | 1699 | RINTESGVPIYAD | 1739 | DYLYSLDF | 1779 |
| | | | DFKG | | | |
| C13F12.1 | HYSMN | 1700 | RINTETGEPLYA | 1740 | DYLYSCDY | 1800 |
| | | | DDFKG | | | |

TABLE 4H
Light Chain Variable Domain CDRs according to the
Kabat numbering scheme (Kabat et al. (1991), “Sequences
of Proteins of Immunological Interest,” 5th Ed.
Public Health Service, National Institutes of Health,
Bethesda, MD).

| Candidate | LCDR1 | ID | LCDR2 | ID | LCDR3 | ID |
|---|---|---|---|---|---|---|
| 139109 | RASQSISSYLN | 2514 | AASSLQS | 2554 | QQSYSTPYT | 2594 |
| 139103 | RASQSISSSFLA | 2504 | GASRRAT | 2544 | QQYHSSPS | 2584 |
| | | | | | WT | |
| 139105 | RSSQSLLHSNG | 2505 | LGSNRAS | 2545 | MQALQTPYT | 2585 |
| | YNYLD | | | | | |
| 139111 | KSSQSLLRNDG | 2506 | EVSNRFS | 2546 | MQNIQFPS | 2586 |
| | KTPLY | | | | | |
| 139100 | RSSQSLLHSNG | 2507 | LGSKRAS | 2547 | MQALQTPYT | 2587 |
| | YNYLN | | | | | |
| 139101 | RASQSISSYLN | 2508 | GASTLAS | 2548 | QQSYKRAS | 2588 |
| 139102 | RSSQSLLYSNG | 2509 | LGSNRAS | 2549 | MQGRQFPYS | 2589 |
| | YNYVD | | | | | |
| 139104 | RASQSVSSNLA | 2510 | GASTRAS | 2550 | QQYGSSLT | 2590 |
| 139106 | RASQSVSSKLA | 2511 | GASIRAT | 2551 | QQYGSSSWT | 2591 |
| 139107 | RASQSVGSTNLA | 2512 | DASNRAT | 2552 | QQYGSSPP | 2592 |
| | | | | | WT | |
| 139108 | RASQSISSYLN | 2513 | AASSLQS | 2553 | QQSYTLA | 2593 |
| 139110 | KSSESLVHNSG | 2515 | EVSNRDS | 2555 | MQGTHWP | 2595 |
| | KTYLN | | | | GT | |
| 139112 | QASEDINKFLN | 2516 | DASTLQT | 2556 | QQYESLPLT | 2596 |
| 139113 | RASQSVGSNLA | 2517 | GASTRAT | 2557 | QQYNDWL | 2597 |
| | | | | | PVT | |
| 139114 | RASQSIGSSSLA | 2518 | GASSRAS | 2558 | QQYAGSPP | 2598 |
| | | | | | FT | |
| 149362 | KASQDIDDAMN | 2519 | SATSPVP | 2559 | LQHDNFPLT | 2599 |
| 149363 | RASQDIYNNLA | 2520 | AANKSQS | 2560 | QHYYRFPYS | 2600 |
| 149364 | RSSQSLLHSNG | 2521 | LGSNRAS | 2561 | MQALQTPYT | 2601 |
| | YNYLD | | | | | |
| 149365 | GGNNIGTKSVH | 2522 | DDSVRPS | 2562 | QVWDSDSE | 2602 |
| | | | | | HVV | |
| 149366 | SGDGLSKKYVS | 2523 | RDKERPS | 2563 | QAWDDTT | 2603 |
| | | | | | VV | |
| 149367 | RASQGIRNWLA | 2524 | AASNLQS | 2564 | QKYNSAPFT | 2604 |
| 149368 | GGNNIGSKSVH | 2525 | GKNNRPS | 2565 | SSRDSSGD | 2605 |
| | | | | | HLRV | |
| 149369 | QGDSLGNYYAT | 2526 | GTNNRPS | 2566 | NSRDSSGH | 2606 |
| | | | | | HLL | |
| BCMA_EBB- | RASQSVSSAYLA | 2527 | GASTRAT | 2567 | QHYGSSFN | 2607 |
| C1978-A4 | | | | | GSSLFT | |
| BCMA_EBB- | RASQSVSNSLA | 2528 | DASSRAT | 2568 | QQFGTSSG | 2608 |
| C1978-G1 | | | | | LT | |
| BCMA_EBB- | RASQSVSSSFLA | 2529 | GASSRAT | 2569 | QQYHSSPS | 2609 |
| C1979-C1 | | | | | WT | |
| BCMA_EBB- | RASQSVSTTFLA | 2530 | GSSNRAT | 2570 | QQYHSSPS | 2610 |
| C1978-C7 | | | | | WT | |
| BCMA_EBB- | RASQSISSYLN | 2531 | AASSLQS | 2571 | QQSYSTPYS | 2611 |
| C1978- | | | | | | |
| D10 | | | | | | |
| BCMA_EBB- | RATQSIGSSFLA | 2532 | GASQRAT | 2572 | QHYESSPS | 2612 |
| C1979- | | | | | WT | |
| C12 | | | | | | |
| BCMA_EBB- | RASQSVSSSYLA | 2533 | GASSRAT | 2573 | QQYGSPPR | 2613 |
| C1980-G4 | | | | | FT | |
| BCMA_EBB- | RASQSVSSSYLA | 2534 | GASSRAT | 2574 | QHYGSSPS | 2614 |
| C1980-D2 | | | | | WT | |
| BCMA_EBB- | RASQRVASNYLA | 2535 | GASSRAT | 2575 | QHYDSSPS | 2615 |
| C1978- | | | | | WT | |
| A10 | | | | | | |
| BCMA_EBB- | RASQSLSSNFLA | 2536 | GASNW | 2576 | QYYGTSPM | 2616 |
| C1978-D4 | | | AT | | YT | |
| BCMA_EBB- | RSSQSLLHSNG | 2537 | LGSNRAS | 2577 | MQALQTPLT | 2617 |
| C1980-A2 | YNYLD | | | | | |
| BCMA_EBB- | RASQSVSSSYLA | 2538 | GTSSRAT | 2578 | QHYGNSPP | 2618 |
| C1981-C3 | | | | | KFT | |
| BCMA_EBB- | RASQSVASSFLA | 2539 | GASGRAT | 2579 | QHYGGSPR | 2619 |
| C1978-G4 | | | | | LT | |
| A7D12.2 | RASQDVNTAVS | 2540 | SASYRYT | 2580 | QQHYSTPWT | 2620 |
| C11D5.3 | RASESVSVIGAH | 2541 | LASNLET | 2581 | LQSRIFPRT | 2621 |
| | LIH | | | | | |
| C12A3.2 | RASESVTILGSH | 2542 | LASNVQT | 2582 | LQSRTIPRT | 2622 |
| | LIY | | | | | |
| C13F12.1 | RASESVTILGSH | 2543 | LASNVQT | 2583 | LQSRTIPRT | 2623 |
| | LIY | | | | | |

TABLE 4I
Heavy Chain Variable Domain CDRs according to a
combination of the Kabat numbering scheme (Kabat et
al. (1991), “Sequences of Proteins of Immunological
Interest,” 5th Ed. Public Health Service, National
Institutes of Health, Bethesda, MD) and the Chothia
numbering scheme (Al-Lazikani et al., (1997)
JMB 273, 927-948).

| Candidate | HCDR1 | ID | HCDR2 | ID | HCDR3 | ID |
|---|---|---|---|---|---|---|
| 139109 | GFALSNHG | 2874 | GIVYSGSTYY | 2914 | HGGESDV | 2954 |
| | MS | | AASVKG | | | |
| 139103 | GFTFSNYA | 2864 | GISRSGENTYY | 2904 | SPAHYYGGMDV | 2944 |
| | MS | | ADSVKG | | | |
| 139105 | GFTFDDYA | 2865 | GISWNSGSIGY | 2905 | HSFLAY | 2945 |
| | MH | | ADSVKG | | | |
| 139111 | GFALSNHG | 2866 | GIVYSGSTYY | 2906 | HGGESDV | 2946 |
| | MS | | AASVKG | | | |
| 139100 | GYIFDNFGIN | 2867 | WINPKNNNTN | 2907 | GPYYYQSYMDV | 2947 |
| | | | YAQKFQG | | | |
| 139101 | GFTFSSDAMT | 2868 | VISGSGGTTYY | 2908 | LDSSGYYYAR | 2948 |
| | | | ADSVKG | | GPRY | |
| 139102 | GYTFSNYGIT | 2869 | WISAYNGNTN | 2909 | GPYYYYMDV | 2949 |
| | | | YAQKFQG | | | |
| 139104 | GFALSNHG | 2870 | GIVYSGSTYY | 2910 | HGGESDV | 2950 |
| | MS | | AASVKG | | | |
| 139106 | GFALSNHG | 2871 | GIVYSGSTYY | 2911 | HGGESDV | 2951 |
| | MS | | AASVKG | | | |
| 139107 | GFALSNHG | 2872 | GIVYSGSTYY | 2912 | HGGESDV | 2952 |
| | MS | | AASVKG | | | |
| 139108 | GFTFSDYY | 2873 | YISSSGSTIYY | 2913 | ESGDGMDV | 2953 |
| | MS | | ADSVKG | | | |
| 139110 | GFTFSDYY | 2875 | YISSSGNTIYY | 2915 | STMVREDY | 2955 |
| | MS | | ADSVKG | | | |
| 139112 | GFALSNHG | 2876 | GIVYSGSTYY | 2916 | HGGESDV | 2956 |
| | MS | | AASVKG | | | |
| 139113 | GFALSNHG | 2877 | GIVYSGSTYY | 2917 | HGGESDV | 2957 |
| | MS | | AASVKG | | | |
| 139114 | GFALSNHG | 2878 | GIVYSGSTYY | 2918 | HGGESDV | 2958 |
| | MS | | AASVKG | | | |
| 149362 | GGSISSSYY | 2879 | SIYYSGSAYY | 2919 | HWQEWPDAFDI | 2959 |
| | YWG | | NPSLKS | | | |
| 149363 | GFSLRTSGM | 2880 | RIDWDEDKFY | 2920 | SGAGGTSATAF | 2960 |
| | CVS | | STSLKT | | DI | |
| 149364 | GFTFSSYSMN | 2881 | SISSSSSYIYYA | 2921 | TIAAVYAFDI | 2961 |
| | | | DSVKG | | | |
| 149365 | GFTFSDYY | 2882 | YISSSGSTIYY | 2922 | DLRGAFDI | 2962 |
| | MS | | ADSVKG | | | |
| 149366 | GYTVTSHYIH | 2883 | MINPSGGVTA | 2923 | EGSGSGWYFDF | 2963 |
| | | | YSQTLQG | | | |
| 149367 | GGSISSGGY | 2884 | YIYYSGSTYY | 2924 | AGIAARLRGAF | 2964 |
| | YWS | | NPSLKS | | DI | |
| 149368 | GGTFSSYAIS | 2885 | GIIPIFGTANY | 2925 | RGGYQLLRWD | 2965 |
| | | | AQKFQG | | VGLLRSAFDI | |
| 149369 | GDSVSSNSA | 2886 | RTYYRSKWYS | 2926 | SSPEGLFLYWF | 2966 |
| | AWN | | FYAISLKS | | DP | |
| BCMA_EBB- | GFTFSSYAMS | 2887 | AISGSGGSTYY | 2927 | VEGSGSLDY | 2967 |
| C1978-A4 | | | ADSVKG | | | |
| BCMA_EBB- | GITFSRYPMS | 2888 | GISDSGVSTYY | 2928 | RAGSEASDI | 2968 |
| C1978-G1 | | | ADSAKG | | | |
| BCMA_EBB- | GFTFSSYAMS | 2889 | AISGSGGSTYY | 2929 | ATYKRELRYY | 2969 |
| C1979-C1 | | | ADSVKG | | YGMDV | |
| BCMA_EBB- | GFTFSSYAMS | 2890 | AISGSGGSTYY | 2930 | ATYKRELRYY | 2970 |
| C1978-C7 | | | ADSVKG | | YGMDV | |
| BCMA_EBB- | GFTFDDYA | 2891 | GISWNSGSIGY | 2931 | VGKAVPDV | 2971 |
| C1978- | MH | | ADSVKG | | | |
| D10 | | | | | | |
| BCMA_EBB- | GFTFDDYA | 2892 | SINWKGNSLA | 2932 | HQGVAYYNYA | 2972 |
| C1979- | MH | | YGDSVKG | | MDV | |
| C12 | | | | | | |
| BCMA_EBB- | GFTFSSYAMS | 2893 | AISGSGGSTYY | 2933 | VVRDGMDV | 2973 |
| C1980-G4 | | | ADSVKG | | | |
| CMA_EBB- | GFTFSSYAMS | 2894 | AISGSGGSTYY | 2934 | IPQTGTFDY | 2974 |
| C1980-D2 | | | ADSVKG | | | |
| BCMA_EBB- | GFTFSSYAMS | 2895 | AISGSGGSTYY | 2935 | ANYKRELRYY | 2975 |
| C1978- | | | ADSVKG | | YGMDV | |
| A10 | | | | | | |
| BCMA_EBB- | GFSFSSYAMS | 2896 | AISGSGGSTYY | 2936 | ALVGATGAFDI | 2976 |
| C1978-D4 | | | ADSVKG | | | |
| BCMA_EBB- | GFTFSSYAMS | 2897 | AISGSGGSTYY | 2937 | WFGEGFDP | 2977 |
| C1980-A2 | | | ADSVKG | | | |
| BCMA_EBB- | GFTFSSYAMS | 2898 | AISGSGGSTYY | 2938 | VGYDSSGYYR | 2978 |
| C1981-C3 | | | ADSVKG | | DYYGMDV | |
| BCMA_EBB- | GFTFSSYAMS | 2899 | AISGSGGSTYY | 2939 | MGWSSGYLGA | 2979 |
| C1978-G4 | | | ADSVKG | | FDI | |
| A7D12.2 | GYTFTNFG | 2900 | WINTYTGESY | 2940 | GEIYYGYDGGF | 2980 |
| | MN | | FADDFKG | | AY | |
| C11D5.3 | GYTFTDYSIN | 2901 | WINTETREPA | 2941 | DYSYAMDY | 2981 |
| | | | YAYDFRG | | | |
| C12A3.2 | GYTFRHYS | 2902 | RINTESGVPIY | 2942 | DYLYSLDF | 2982 |
| | MN | | ADDFKG | | | |
| C13F12.1 | GYTFTHYS | 2903 | RINTETGEPLY | 2943 | DYLYSCDY | 2983 |
| | MN | | ADDFKG | | | |

TABLE 4J
Light Chain Variable Domain CDRs according to a
combination of the Kabat numbering scheme (Kabat
et al. (1991), “Sequences of Proteins of Immunological
Interest,” 5th Ed. Public Health Service,
National Institutes of Health, Bethesda, MD)
and the Chothia numbering scheme (Al-Lazikani
et al., (1997) JMB 273, 927-948).

| Candidate | LCDR1 | ID | LCDR2 | ID | LCDR3 | ID |
|---|---|---|---|---|---|---|
| 139109 | RASQSISSYLN | 3994 | AASSLQS | 1034 | QQSYSTPYT | 3074 |
| 139103 | RASQSISSSFLA | 3984 | GASRRAT | 3024 | QQYHSSPS | 3064 |
| | | | | | WT | |
| 139105 | RSSQSLLHSNGYNY | 3985 | LGSNRAS | 3025 | MQALQTPYT | 3065 |
| | LD | | | | | |
| 139111 | KSSQSLLRNDGKTPLY | 3986 | EVSNRFS | 3026 | MQNIQFPS | 3066 |
| 139100 | RSSQSLLHSNGYNY | 3987 | LGSKRAS | 3027 | MQALQTPYT | 3067 |
| | LN | | | | | |
| 139101 | RASQSISSYLN | 3988 | GASTLAS | 3028 | QQSYKRAS | 3068 |
| 139102 | RSSQSLLYSNGYNY | 3989 | LGSNRAS | 3029 | MQGRQFPYS | 3069 |
| | VD | | | | | |
| 139104 | RASQSVSSNLA | 3990 | GASTRAS | 3030 | QQYGSSLT | 3070 |
| 139106 | RASQSVSSKLA | 3991 | GASIRAT | 3031 | QQYGSSSWT | 3071 |
| 139107 | RASQSVGSTNLA | 3992 | DASNRAT | 3032 | QQYGSSPP | 3072 |
| | | | | | WT | |
| 139108 | RASQSISSYLN | 3993 | AASSLQS | 3033 | QQSYTLA | 3073 |
| 139110 | KSSESLVHNSGKTY | 3995 | EVSNRDS | 3035 | MQGTHWP | 3075 |
| | LN | | | | GT | |
| 139112 | QASEDINKFLN | 3996 | DASTLQT | 3036 | QQYESLPLT | 3076 |
| 139113 | RASQSVGSNLA | 3997 | GASTRAT | 3037 | QQYNDWLP | 3077 |
| | | | | | VT | |
| 139114 | RASQSIGSSSLA | 3998 | GASSRAS | 3038 | QQYAGSPPFT | 3078 |
| 149362 | KASQDIDDAMN | 3999 | SATSPVP | 3039 | LQHDNFPLT | 3079 |
| 149363 | RASQDIYNNLA | 3000 | AANKSQS | 3040 | QHYYRFPYS | 3080 |
| 149364 | RSSQSLLHSNGYNY | 3001 | LGSNRAS | 3041 | MQALQTPYT | 3081 |
| | LD | | | | | |
| 149365 | GGNNIGTKSVH | 3002 | DDSVRPS | 3042 | QVWDSDSE | 3082 |
| | | | | | HVV | |
| 149366 | SGDGLSKKYVS | 3003 | RDKERPS | 3043 | QAWDDTTVV | 3083 |
| 149367 | RASQGIRNWLA | 3004 | AASNLQS | 3044 | QKYNSAPFT | 3084 |
| 149368 | GGNNIGSKSVH | 3005 | GKNNRPS | 3045 | SSRDSSGDH | 3085 |
| | | | | | LRV | |
| 149369 | QGDSLGNYYAT | 3006 | GTNNRPS | 3046 | NSRDSSGH | 3086 |
| | | | | | HLL | |
| BCMA_EBB- | RASQSVSSAYLA | 3007 | GASTRAT | 3047 | QHYGSSFN | 3087 |
| C1978- | | | | | GSSLFT | |
| A4 | | | | | | |
| BCMA_EBB- | RASQSVSNSLA | 3008 | DASSRAT | 3048 | QQFGTSSGLT | 3088 |
| C1978- | | | | | | |
| G1 | | | | | | |
| BCMA_EBB- | RASQSVSSSFLA | 3009 | GASSRAT | 3049 | QQYHSSPS | 3089 |
| C1979- | | | | | WT | |
| C1 | | | | | | |
| BCMA_EBB- | RASQSVSTTFLA | 3010 | GSSNRAT | 3050 | QQYHSSPS | 3090 |
| C1978- | | | | | WT | |
| C7 | | | | | | |
| BCMA_EBB- | RASQSISSYLN | 3011 | AASSLQS | 3051 | QQSYSTPYS | 3091 |
| C1978- | | | | | | |
| D10 | | | | | | |
| BCMA_EBB- | RATQSIGSSFLA | 3012 | GASQRAT | 3052 | QHYESSPS | 3092 |
| C1979- | | | | | WT | |
| C12 | | | | | | |
| BCMA_EBB- | RASQSVSSSYLA | 3013 | GASSRAT | 3053 | QQYGSPPRFT | 3093 |
| C1980- | | | | | | |
| G4 | | | | | | |
| BCMA_EBB- | RASQSVSSSYLA | 3014 | GASSRAT | 3054 | QHYGSSPS | 3094 |
| C1980- | | | | | WT | |
| D2 | | | | | | |
| BCMA_EBB- | RASQRVASNYLA | 3015 | GASSRAT | 3055 | QHYDSSPS | 3095 |
| C1978- | | | | | WT | |
| A10 | | | | | | |
| BCMA_EBB- | RASQSLSSNFLA | 3016 | GASNWAT | 3056 | QYYGTSPM | 3096 |
| C1978- | | | | | YT | |
| D4 | | | | | | |
| BCMA_EBB- | RSSQSLLHSNGYNY | 3017 | LGSNRAS | 3057 | MQALQTPLT | 3097 |
| C1980- | LD | | | | | |
| A2 | | | | | | |
| BCMA_EBB- | RASQSVSSSYLA | 3018 | GTSSRAT | 3058 | QHYGNSPP | 3098 |
| C1981- | | | | | KFT | |
| C3 | | | | | | |
| BCMA_EBB- | RASQSVASSFLA | 3019 | GASGRAT | 3059 | QHYGGSPR | 3099 |
| C1978- | | | | | LT | |
| G4 | | | | | | |
| A7D12.2 | RASQDVNTAVS | 3020 | SASYRYT | 3060 | QQHYSTPWT | 3100 |
| C11D5.3 | RASESVSVIGAHLIH | 3021 | LASNLET | 3061 | LQSRIFPRT | 3101 |
| C12A3.2 | RASESVTILGSHLIY | 3022 | LASNVQT | 3062 | LQSRTIPRT | 3102 |
| C13F12.1 | RASESVTILGSHLIY | 3023 | LASNVQT | 3063 | LQSRTIPRT | 3103 |

### Chimeric Antigen Receptor (CAR)

[0320] The present invention encompasses a recombinant DNA construct comprising sequences encoding a CAR, wherein the CAR comprises an antigen binding domain (e.g., antibody or antibody fragment, TCR or TCR fragment) that binds specifically to a cancer associated antigen described herein, wherein the sequence of the antigen binding domain is contiguous with and in the same reading frame as a nucleic acid sequence encoding an intracellular signaling domain. The intracellular signaling domain can comprise a costimulatory signaling domain and/or a primary signaling domain, e.g., a zeta chain. The costimulatory signaling domain refers to a portion of the CAR comprising at least a portion of the intracellular domain of a costimulatory molecule.

[0321] In specific aspects, a CAR construct of the invention comprises a scFv domain, wherein the scFv may be preceded by an optional leader sequence such as provided in SEQ ID NO: 2, and followed by an optional hinge sequence such as provided in SEQ ID NO:4 or SEQ ID NO:6 or SEQ ID NO:8 or SEQ ID NO:10, a transmembrane region such as provided in SEQ ID NO:12, an intracellular signalling domain that includes SEQ ID NO:14 or SEQ ID NO:16 and a CD3 zeta sequence that includes SEQ ID NO:18 or SEQ ID NO:20, e.g., wherein the domains are contiguous with and in the same reading frame to form a single fusion protein.

[0322] In one aspect, an exemplary CAR constructs comprise an optional leader sequence (e.g., a leader sequence described herein), an extracellular antigen binding domain (e.g., an antigen binding domain described herein), a hinge (e.g., a hinge region described herein), a transmembrane domain (e.g., a transmembrane domain described herein), and an intracellular stimulatory domain (e.g., an intracellular stimulatory domain described herein). In one aspect, an exemplary CAR construct comprises an optional leader sequence (e.g., a leader sequence described herein), an extracellular antigen binding domain (e.g., an antigen binding domain described herein), a hinge (e.g., a hinge region described herein), a transmembrane domain (e.g., a transmembrane domain described herein), an intracellular costimulatory signaling domain (e.g., a costimulatory signaling domain described herein) and/or an intracellular primary signaling domain (e.g., a primary signaling domain described herein).

[0323] An exemplary leader sequence is provided as SEQ ID NO: 2. An exemplary hinge/spacer sequence is provided as SEQ ID NO: 4 or SEQ ID NO:6 or SEQ ID NO:8 or SEQ ID NO:10. An exemplary transmembrane domain sequence is provided as SEQ ID NO:12. An exemplary sequence of the intracellular signaling domain of the 4-1BB protein is provided as SEQ ID NO: 14. An exemplary sequence of the intracellular signaling domain of CD27 is provided as SEQ ID NO:16. An exemplary CD3zeta domain sequence is provided as SEQ ID NO: 18 or SEQ ID NO:20.

[0324] In one aspect, the present invention encompasses a recombinant nucleic acid construct comprising a nucleic acid molecule encoding a CAR, wherein the nucleic acid molecule comprises the nucleic acid sequence encoding an antigen binding domain, e.g., described herein, that is contiguous with and in the same reading frame as a nucleic acid sequence encoding an intracellular signaling domain.

[0325] In one aspect, the present invention encompasses a recombinant nucleic acid construct comprising a nucleic acid molecule encoding a CAR, wherein the nucleic acid molecule comprises a nucleic acid sequence encoding an antigen binding domain, wherein the sequence is contiguous with and in the same reading frame as the nucleic acid sequence encoding an intracellular signaling domain. An exemplary intracellular signaling domain that can be used in the CAR includes, but is not limited to, one or more intracellular signaling domains of, e.g., CD3-zeta, CD28, CD27, 4-1BB, and the like. In some instances, the CAR can comprise any combination of CD3-zeta, CD28, 4-1BB, and the like.

[0326] The nucleic acid sequences coding for the desired molecules can be obtained using recombinant methods known in the art, such as, for example by screening libraries from cells expressing the nucleic acid molecule, by deriving the nucleic acid molecule from a vector known to include the same, or by isolating directly from cells and tissues containing the same, using standard techniques. Alternatively, the nucleic acid of interest can be produced synthetically, rather than cloned.

[0327] The present invention includes retroviral and lentiviral vector constructs expressing a CAR that can be directly transduced into a cell.

[0328] The present invention also includes an RNA construct that can be directly transfected into a cell. A method for generating mRNA for use in transfection involves in vitro transcription (IVT) of a template with specially designed primers, followed by polyA addition, to produce a construct containing 3′ and 5′ untranslated sequence (“UTR”) (e.g., a 3′ and/or 5′ UTR described herein), a 5′ cap (e.g., a 5′ cap described herein) and/or Internal Ribosome Entry Site (IRES) (e.g., an IRES described herein), the nucleic acid to be expressed, and a polyA tail, typically 50-2000 bases in length (SEQ ID NO:32). RNA so produced can efficiently transfect different kinds of cells. In one embodiment, the template includes sequences for the CAR. In an embodiment, an RNA CAR vector is transduced into a cell, e.g., a T cell or a NK cell, by electroporation.

[0329] Antigen Binding Domain

[0330] In one aspect, the CAR of the invention comprises a target-specific binding element otherwise referred to as an antigen binding domain. The choice of moiety depends upon the type and number of ligands that define the surface of a target cell. For example, the antigen binding domain may be chosen to recognize a ligand that acts as a cell surface marker on target cells associated with a particular disease state. Thus, examples of cell surface markers that may act as ligands for the antigen binding domain in a CAR of the invention include those associated with viral, bacterial and parasitic infections, autoimmune disease and cancer cells.

[0331] In one aspect, the CAR-mediated T-cell response can be directed to an antigen of interest by way of engineering an antigen binding domain that specifically binds a desired antigen into the CAR.

[0332] In one aspect, the portion of the CAR comprising the antigen binding domain comprises an antigen binding domain that targets a tumor antigen, e.g., a tumor antigen described herein.

[0333] The antigen binding domain can be any domain that binds to the antigen including but not limited to a monoclonal antibody, a polyclonal antibody, a recombinant antibody, a human antibody, a humanized antibody, and a functional fragment thereof, including but not limited to a single-domain antibody such as a heavy chain variable domain (VH), a light chain variable domain (VL) and a variable domain (VHH) of camelid derived nanobody, and to an alternative scaffold known in the art to function as antigen binding domain, such as a recombinant fibronectin domain, a T cell receptor (TCR), or a fragment there of, e.g., single chain TCR, and the like. In some instances, it is beneficial for the antigen binding domain to be derived from the same species in which the CAR will ultimately be used in. For example, for use in humans, it may be beneficial for the antigen binding domain of the CAR to comprise human or humanized residues for the antigen binding domain of an antibody or antibody fragment.

[0334] In one embodiment, the CD19 CAR is a CD19 CAR described in U.S. Pat. Nos. 8,399,645; 7,446,190; Xu et al., Leuk Lymphoma. 2013 54(2):255-260(2012); Cruz et al., Blood 122(17):2965-2973 (2013); Brentjens et al., Blood, 118(18):4817-4828 (2011); Kochenderfer et al., Blood 116(20):4099-102 (2010); Kochenderfer et al., Blood 122 (25):4129-39(2013); or 16th Annu Meet Am Soc Gen Cell Ther (ASGCT) (May 15-18, Salt Lake City) 2013, Abst 10 (each of which is herein incorporated by reference in their entirety). In one embodiment, an antigen binding domain against CD19 is an antigen binding portion, e.g., CDRs, of a CAR, antibody or antigen-binding fragment thereof described in, e.g., PCT publication WO2012/079000 (incorporated herein by reference in its entirety). In one embodiment, an antigen binding domain against CD19 is an antigen binding portion, e.g., CDRs, of a CAR, antibody or antigen-binding fragment thereof described in, e.g., PCT publication WO2014/153270; Kochenderfer, J. N. et al., J. Immunother. 32 (7), 689-702 (2009); Kochenderfer, J. N., et al., Blood, 116 (20), 4099-4102 (2010); PCT publication WO2014/031687; Bejcek, Cancer Research, 55, 2346-2351, 1995; or U.S. Pat. No. 7,446,190 (each of which is herein incorporated by reference in their entirety).

[0335] In one embodiment, the antigen binding domain against mesothelin is or may be derived from an antigen binding domain, e.g., CDRs, scFv, or VH and VL, of an antibody, antigen-binding fragment or CAR described in, e.g., PCT publication WO2015/090230 (In one embodiment the CAR is a CAR described in WO2015/090230, the contents of which are incorporated herein in their entirety). In some embodiments, the antigen binding domain against mesothelin is or is derived from an antigen binding portion, e.g., CDRs, scFv, or VH and VL, of an antibody, antigen-binding fragment, or CAR described in, e.g., PCT publication WO1997/025068, WO1999/028471, WO2005/014652, WO2006/099141, WO2009/045957, WO2009/068204, WO2013/142034, WO2013/040557, or WO2013/063419 (each of which is herein incorporated by reference in their entirety).

[0336] In one embodiment, an antigen binding domain against CD123 is or is derived from an antigen binding portion, e.g., CDRs, scFv or VH and VL, of an antibody, antigen-binding fragment or CAR described in, e.g., PCT publication WO2014/130635 (incorporated herein by referenc in its entirety). In one embodiment, an antigen binding domain against CD123 is or is derived from an antigen binding portion, e.g., CDRs, scFv or VH and VL, of an antibody, antigen-binding fragment or CAR described in, e.g., PCT publication WO2016/028896 (incorporated herein by referenc in its entirety); in some embodiments, the CAR is a CAR described in WO2016/028896. In one embodiment, an antigen binding domain against CD123 is or is derived from an antigen binding portion, e.g., CDRs, scFv, or VL and VH, of an antibody, antigen-binding fragment, or CAR described in, e.g., PCT publication WO1997/024373, WO2008/127735 (e.g., a CD123 binding domain of 26292, 32701, 37716 or 32703), WO2014/138805 (e.g., a CD123 binding domain of CSL362), WO2014/138819, WO2013/173820, WO2014/144622, WO2001/66139, WO2010/126066 (e.g., the CD123 binding domain of any of Old4, Old5, Old17, Old19, New102, or Old6), WO2014/144622, or US2009/0252742 (each of which is incorporated herein by reference in its entirety).

[0337] In one embodiment, an antigen binding domain against CD22 is an antigen binding portion, e.g., CDRs, of an antibody described in, e.g., Haso et al., Blood, 121(7): 1165-1174 (2013); Wayne et al., Clin Cancer Res 16(6): 1894-1903 (2010); Kato et al., Leuk Res 37(1):83-88 (2013); Creative BioMart (creativebiomart.net): MOM-18047-S(P).

[0338] In one embodiment, an antigen binding domain against CS-1 is an antigen binding portion, e.g., CDRs, of Elotuzumab (BMS), see e.g., Tai et al., 2008, Blood 112(4):1329-37; Tai et al., 2007, Blood. 110(5):1656-63.

[0339] In one embodiment, an antigen binding domain against CLL-1 is an antigen binding portion, e.g., CDRs or VH and VL, of an antibody, antigen-binding fragment or CAR described in, e.g., PCT publication WO2016/014535, the contents of which are incorporated herein in their entirety. In one embodiment, an antigen binding domain against CLL-1 is an antigen binding portion, e.g., CDRs, of an antibody available from R&D, ebiosciences, Abcam, for example, PE-CLL1-hu Cat #353604 (BioLegend); and PE-CLL1 (CLEC12A) Cat #562566 (BD).

[0340] In one embodiment, an antigen binding domain against CD33 is an antigen binding portion, e.g., CDRs, of an antibody described in, e.g., Bross et al., Clin Cancer Res 7(6):1490-1496 (2001) (Gemtuzumab Ozogamicin, hP67.6), Caron et al., Cancer Res 52(24):6761-6767 (1992) (Lintuzumab, HuM195), Lapusan et al., Invest New Drugs 30(3):1121-1131 (2012) (AVE9633), Aigner et al., Leukemia 27(5): 1107-1115 (2013) (AMG330, CD33 BiTE), Dutour et al., Adv hematol 2012:683065 (2012), and Pizzitola et al., Leukemia doi:10.1038/Lue.2014.62 (2014). Exemplary CAR molecules that target CD33 are described herein, and are provided in WO2016/014576, e.g., in Table 2 of WO2016/014576 (incorporated by reference in its entirety).

[0341] In one embodiment, an antigen binding domain against GD2 is an antigen binding portion, e.g., CDRs, of an antibody described in, e.g., Mujoo et al., Cancer Res. 47(4):1098-1104 (1987); Cheung et al., Cancer Res 45(6):2642-2649 (1985), Cheung et al., J Clin Oncol 5(9):1430-1440 (1987), Cheung et al., J Clin Oncol 16(9):3053-3060 (1998), Handgretinger et al., Cancer Immunol Immunother 35(3):199-204 (1992). In some embodiments, an antigen binding domain against GD2 is an antigen binding portion of an antibody selected from mAb 14.18, 14G2a, ch14.18, hu14.18, 3F8, hu3F8, 3G6, 8B6, 60C3, 10B8, ME36.1, and 8H9, see e.g., WO2012033885, WO2013040371, WO2013192294, WO2013061273, WO2013123061, WO2013074916, and WO201385552. In some embodiments, an antigen binding domain against GD2 is an antigen binding portion of an antibody described in US Publication No.: 20100150910 or PCT Publication No.: WO 2011160119.

[0342] In one embodiment, an antigen binding domain against BCMA is an antigen binding portion, e.g., CDRs, of an antibody described in, e.g., WO2012163805, WO200112812, and WO2003062401. In some embodiments, additional exemplary BCMA CAR constructs are generated using an antigen binding domain, e.g., CDRs, scFv, or VH and VL sequences from PCT Publication WO2012/0163805 (the contents of which are hereby incorporated by reference in its entirety). In some embodiments, additional exemplary BCMA CAR constructs are generated using an antigen binding domain, e.g., CDRs, scFv, or VH and VL sequences from PCT Publication WO2016/014565 (the contents of which are hereby incorporated by reference in its entirety). In some embodiments, additional exemplary BCMA CAR constructs are generated using an antigen binding domain, e.g., CDRs, scFv, or VH and VL sequences from PCT Publication WO2014/122144 (the contents of which are hereby incorporated by reference in its entirety). In some embodiments, additional exemplary BCMA CAR constructs are generated using the CAR molecules, and/or the BCMA binding domains (e.g., CDRs, scFv, or VH and VL sequences) from PCT Publication WO2016/014789 (the contents of which are hereby incorporated by reference in its entirety). In some embodiments, additional exemplary BCMA CAR constructs are generated using the CAR molecules, and/or the BCMA binding domains (e.g., CDRs, scFv, or VH and VL sequences) from PCT Publication WO2014/089335 (the contents of which are hereby incorporated by reference in its entirety). In some embodiments, additional exemplary BCMA CAR constructs are generated using the CAR molecules, and/or the BCMA binding domains (e.g., CDRs, scFv, or VH and VL sequences) from PCT Publication WO2014/140248 (the contents of which are hereby incorporated by reference in its entirety).

[0343] In one embodiment, an antigen binding domain against Tn antigen is an antigen binding portion, e.g., CDRs, of an antibody described in, e.g., US 2014/0178365, U.S. Pat. No. 8,440,798, Brooks et al., PNAS 107(22):10056-10061 (2010), and Stone et al., Oncolmmunology 1(6):863-873(2012).

[0344] In one embodiment, an antigen binding domain against PSMA is an antigen binding portion, e.g., CDRs, of an antibody described in, e.g., Parker et al., Protein Expr Purif 89(2):136-145 (2013), US 20110268656 (J591 ScFv); Frigerio et al, European J Cancer 49(9):2223-2232 (2013) (scFvD2B); WO 2006125481 (mAbs 3/A12, 3/E7 and 3/F11) and single chain antibody fragments (scFv A5 and D7).

[0345] In one embodiment, an antigen binding domain against ROR1 is an antigen binding portion, e.g., CDRs, of an antibody described in, e.g., Hudecek et al., Clin Cancer Res 19(12):3153-3164 (2013); WO 2011159847; and US20130101607.

[0346] In one embodiment, an antigen binding domain against FLT3 is an antigen binding portion, e.g., CDRs, of an antibody described in, e.g., WO2011076922, U.S. Pat. No. 5,777,084, EP0754230, US20090297529, and several commercial catalog antibodies (R&D, ebiosciences, Abcam).

[0347] In one embodiment, an antigen binding domain against TAG72 is an antigen binding portion, e.g., CDRs, of an antibody described in, e.g., Hombach et al., Gastroenterology 113(4):1163-1170 (1997); and Abcam ab691.

[0348] In one embodiment, an antigen binding domain against FAP is an antigen binding portion, e.g., CDRs, of an antibody described in, e.g., Ostermann et al., Clinical Cancer Research 14:4584-4592 (2008) (FAPS), US Pat. Publication No. 2009/0304718; sibrotuzumab (see e.g., Hofheinz et al., Oncology Research and Treatment 26(1), 2003); and Tran et al., J Exp Med 210(6):1125-1135 (2013).

[0349] In one embodiment, an antigen binding domain against CD38 is an antigen binding portion, e.g., CDRs, of daratumumab (see, e.g., Groen et al., Blood 116(21):1261-1262 (2010); MOR202 (see, e.g., U.S. Pat. No. 8,263,746); or antibodies described in U.S. Pat. No. 8,362,211.

[0350] In one embodiment, an antigen binding domain against CD44v6 is an antigen binding portion, e.g., CDRs, of an antibody described in, e.g., Casucci et al., Blood 122(20):3461-3472 (2013).

[0351] In one embodiment, an antigen binding domain against CEA is an antigen binding portion, e.g., CDRs, of an antibody described in, e.g., Chmielewski et al., Gastoenterology 143(4):1095-1107 (2012).

[0352] In one embodiment, an antigen binding domain against EPCAM is an antigen binding portion, e.g., CDRS, of an antibody selected from MT110, EpCAM-CD3 bispecific Ab (see, e.g., clinicaltrials.gov/ct2/show/NCT00635596); Edrecolomab; 3622W94; ING-1; and adecatumumab (MT201).

[0353] In one embodiment, an antigen binding domain against PRSS21 is an antigen binding portion, e.g., CDRs, of an antibody described in U.S. Pat. No. 8,080,650.

[0354] In one embodiment, an antigen binding domain against B7H3 is an antigen binding portion, e.g., CDRs, of an antibody MGA271 (Macrogenics).

[0355] In one embodiment, an antigen binding domain against KIT is an antigen binding portion, e.g., CDRs, of an antibody described in, e.g., U.S. Pat. No. 7,915,391, US20120288506, and several commercial catalog antibodies.

[0356] In one embodiment, an antigen binding domain against IL-13Ra2 is an antigen binding portion, e.g., CDRs, of an antibody described in, e.g., WO2008/146911, WO2004087758, several commercial catalog antibodies, and WO2004087758.

[0357] In one embodiment, an antigen binding domain against CD30 is an antigen binding portion, e.g., CDRs, of an antibody described in, e.g., U.S. Pat. No. 7,090,843 B1, and EP0805871.

[0358] In one embodiment, an antigen binding domain against GD3 is an antigen binding portion, e.g., CDRs, of an antibody described in, e.g., U.S. Pat. Nos. 7,253,263; 8,207,308; US 20120276046; EP1013761; WO2005035577; and U.S. Pat. No. 6,437,098.

[0359] In one embodiment, an antigen binding domain against CD171 is an antigen binding portion, e.g., CDRs, of an antibody described in, e.g., Hong et al., J Immunother 37(2):93-104 (2014).

[0360] In one embodiment, an antigen binding domain against IL-11Ra is an antigen binding portion, e.g., CDRs, of an antibody available from Abcam (cat # ab55262) or Novus Biologicals (cat # EPR5446). In another embodiment, an antigen binding domain again IL-11Ra is a peptide, see, e.g., Huang et al., Cancer Res 72(1):271-281 (2012).

[0361] In one embodiment, an antigen binding domain against PSCA is an antigen binding portion, e.g., CDRs, of an antibody described in, e.g., Morgenroth et al., Prostate 67(10):1121-1131 (2007) (scFv 7F5); Nejatollahi et al., J of Oncology 2013(2013), article ID 839831 (scFv C5-II); and US Pat Publication No. 20090311181.

[0362] In one embodiment, an antigen binding domain against VEGFR2 is an antigen binding portion, e.g., CDRs, of an antibody described in, e.g., Chinnasamy et al., J Clin Invest 120(11):3953-3968 (2010).

[0363] In one embodiment, an antigen binding domain against LewisY is an antigen binding portion, e.g., CDRs, of an antibody described in, e.g., Kelly et al., Cancer Biother Radiopharm 23(4):411-423 (2008) (hu3S193 Ab (scFvs)); Dolezal et al., Protein Engineering 16(1):47-56 (2003) (NC10 scFv).

[0364] In one embodiment, an antigen binding domain against CD24 is an antigen binding portion, e.g., CDRs, of an antibody described in, e.g., Maliar et al., Gastroenterology 143(5):1375-1384 (2012).

[0365] In one embodiment, an antigen binding domain against PDGFR-beta is an antigen binding portion, e.g., CDRs, of an antibody Abcam ab32570.

[0366] In one embodiment, an antigen binding domain against SSEA-4 is an antigen binding portion, e.g., CDRs, of antibody MC813 (Cell Signaling), or other commercially available antibodies.

[0367] In one embodiment, an antigen binding domain against CD20 is an antigen binding portion, e.g., CDRs, of the antibody Rituximab, Ofatumumab, Ocrelizumab, Veltuzumab, or GA101.

[0368] In one embodiment, an antigen binding domain against Folate receptor alpha is an antigen binding portion, e.g., CDRs, of the antibody IMGN853, or an antibody described in US20120009181; U.S. Pat. No. 4,851,332, LK26: U.S. Pat. No. 5,952,484.

[0369] In one embodiment, an antigen binding domain against ERBB2 (Her2/neu) is an antigen binding portion, e.g., CDRs, of the antibody trastuzumab, or pertuzumab.

[0370] In one embodiment, an antigen binding domain against MUC1 is an antigen binding portion, e.g., CDRs, of the antibody SAR566658.

[0371] In one embodiment, the antigen binding domain against EGFR is antigen binding portion, e.g., CDRs, of the antibody cetuximab, panitumumab, zalutumumab, nimotuzumab, or matuzumab. In one embodiment, the antigen binding domain against EGFRvIII is or may be derived from an antigen binding domain, e.g., CDRs, scFv, or VH and VL, of an antibody, antigen-binding fragment or CAR described in, e.g., PCT publication WO2014/130657 (In one embodiment the CAR is a CAR described in WO2014/130657, the contents of which are incorporated herein in their entirety).

[0372] In one embodiment, an antigen binding domain against NCAM is an antigen binding portion, e.g., CDRs, of the antibody clone 2-2B: MAB5324 (EMD Millipore)

[0373] In one embodiment, an antigen binding domain against Ephrin B2 is an antigen binding portion, e.g., CDRs, of an antibody described in, e.g., Abengozar et al., Blood 119(19):4565-4576 (2012).

[0374] In one embodiment, an antigen binding domain against IGF-I receptor is an antigen binding portion, e.g., CDRs, of an antibody described in, e.g., U.S. Pat. No. 8,344,112 B2; EP2322550 A1; WO 2006/138315, or PCT/US2006/022995.

[0375] In one embodiment, an antigen binding domain against CAIX is an antigen binding portion, e.g., CDRs, of the antibody clone 303123 (R&D Systems).

[0376] In one embodiment, an antigen binding domain against LMP2 is an antigen binding portion, e.g., CDRs, of an antibody described in, e.g., U.S. Pat. No. 7,410,640, or US20050129701.

[0377] In one embodiment, an antigen binding domain against gp100 is an antigen binding portion, e.g., CDRs, of the antibody HMB45, NKIbetaB, or an antibody described in WO2013165940, or US20130295007.

[0378] In one embodiment, an antigen binding domain against tyrosinase is an antigen binding portion, e.g., CDRs, of an antibody described in, e.g., U.S. Pat. No. 5,843,674; or US19950504048.

[0379] In one embodiment, an antigen binding domain against EphA2 is an antigen binding portion, e.g., CDRs, of an antibody described in, e.g., Yu et al., Mol Ther 22(1):102-111 (2014).

[0380] In one embodiment, an antigen binding domain against GD3 is an antigen binding portion, e.g., CDRs, of an antibody described in, e.g., U.S. Pat. Nos. 7,253,263; 8,207,308; US 20120276046; EP1013761 A3; 20120276046; WO2005035577; or U.S. Pat. No. 6,437,098.

[0381] In one embodiment, an antigen binding domain against fucosyl GM1 is an antigen binding portion, e.g., CDRs, of an antibody described in, e.g., US20100297138; or WO2007/067992.

[0382] In one embodiment, an antigen binding domain against sLe is an antigen binding portion, e.g., CDRs, of the antibody G193 (for lewis Y), see Scott A M et al, Cancer Res 60: 3254-61 (2000), also as described in Neeson et al, J Immunol May 2013 190 (Meeting Abstract Supplement) 177.10.

[0383] In one embodiment, an antigen binding domain against GM3 is an antigen binding portion, e.g., CDRs, of the antibody CA 2523449 (mAb 14F7).

[0384] In one embodiment, an antigen binding domain against HMWMAA is an antigen binding portion, e.g., CDRs, of an antibody described in, e.g., Kmiecik et al., Oncoimmunology 3(1):e27185 (2014) (PMID: 24575382) (mAb9.2.27); U.S. Pat. No. 6,528,481; WO2010033866; or US 20140004124.

[0385] In one embodiment, an antigen binding domain against o-acetyl-GD2 is an antigen binding portion, e.g., CDRs, of the antibody 8B6.

[0386] In one embodiment, an antigen binding domain against TEM1/CD248 is an antigen binding portion, e.g., CDRs, of an antibody described in, e.g., Marty et al., Cancer Lett 235(2):298-308 (2006); Zhao et al., J Immunol Methods 363(2):221-232 (2011).

[0387] In one embodiment, an antigen binding domain against CLDN6 is an antigen binding portion, e.g., CDRs, of the antibody IMAB027 (Ganymed Pharmaceuticals), see e.g., clinicaltrial.gov/show/NCT02054351.

[0388] In one embodiment, an antigen binding domain against TSHR is an antigen binding portion, e.g., CDRs, of an antibody described in, e.g., U.S. Pat. Nos. 8,603,466; 8,501,415; or U.S. Pat. No. 8,309,693.

[0389] In one embodiment, an antigen binding domain against GPRC5D is an antigen binding portion, e.g., CDRs, of the antibody FAB6300A (R&D Systems); or LS-A4180 (Lifespan Biosciences).

[0390] In one embodiment, an antigen binding domain against CD97 is an antigen binding portion, e.g., CDRs, of an antibody described in, e.g., U.S. Pat. No. 6,846,911; de Groot et al., J Immunol 183(6):4127-4134 (2009); or an antibody from R&D:MAB3734.

[0391] In one embodiment, an antigen binding domain against ALK is an antigen binding portion, e.g., CDRs, of an antibody described in, e.g., Mino-Kenudson et al., Clin Cancer Res 16(5):1561-1571 (2010).

[0392] In one embodiment, an antigen binding domain against polysialic acid is an antigen binding portion, e.g., CDRs, of an antibody described in, e.g., Nagae et al., J Biol Chem 288(47):33784-33796 (2013).

[0393] In one embodiment, an antigen binding domain against PLAC1 is an antigen binding portion, e.g., CDRs, of an antibody described in, e.g., Ghods et al., Biotechnol Appl Biochem 2013 doi:10.1002/bab.1177.

[0394] In one embodiment, an antigen binding domain against GloboH is an antigen binding portion of the antibody VK9; or an antibody described in, e.g., Kudryashov V et al, Glycoconj J.15(3):243-9 (1998), Lou et al., Proc Natl Acad Sci USA 111(7):2482-2487 (2014); MBr1: Bremer E-G et al. J Biol Chem 259:14773-14777 (1984).

[0395] In one embodiment, an antigen binding domain against NY-BR-1 is an antigen binding portion, e.g., CDRs of an antibody described in, e.g., Jager et al., Appl Immunohistochem Mol Morphol 15(1):77-83 (2007).

[0396] In one embodiment, an antigen binding domain against WT-1 is an antigen binding portion, e.g., CDRs, of an antibody described in, e.g., Dao et al., Sci Transl Med 5(176):176ra33 (2013); or WO2012/135854.

[0397] In one embodiment, an antigen binding domain against MAGE-A1 is an antigen binding portion, e.g., CDRs, of an antibody described in, e.g., Willemsen et al., J Immunol 174(12):7853-7858 (2005) (TCR-like scFv).

[0398] In one embodiment, an antigen binding domain against sperm protein 17 is an antigen binding portion, e.g., CDRs, of an antibody described in, e.g., Song et al., Target Oncol 2013 Aug. 14 (PMID: 23943313); Song et al., Med Oncol 29(4):2923-2931 (2012).

[0399] In one embodiment, an antigen binding domain against Tie 2 is an antigen binding portion, e.g., CDRs, of the antibody AB33 (Cell Signaling Technology).

[0400] In one embodiment, an antigen binding domain against MAD-CT-2 is an antigen binding portion, e.g., CDRs, of an antibody described in, e.g., PMID: 2450952; U.S. Pat. No. 7,635,753.

[0401] In one embodiment, an antigen binding domain against Fos-related antigen 1 is an antigen binding portion, e.g., CDRs, of the antibody 12F9 (Novus Biologicals).

[0402] In one embodiment, an antigen binding domain against MelanA/MART1 is an antigen binding portion, e.g., CDRs, of an antibody described in, EP2514766 A2; or U.S. Pat. No. 7,749,719.

[0403] In one embodiment, an antigen binding domain against sarcoma translocation breakpoints is an antigen binding portion, e.g., CDRs, of an antibody described in, e.g., Luo et al, EMBO Mol. Med. 4(6):453-461 (2012).

[0404] In one embodiment, an antigen binding domain against TRP-2 is an antigen binding portion, e.g., CDRs, of an antibody described in, e.g., Wang et al, J Exp Med. 184(6):2207-16 (1996).

[0405] In one embodiment, an antigen binding domain against CYP1B1 is an antigen binding portion, e.g., CDRs, of an antibody described in, e.g., Maecker et al, Blood 102 (9): 3287-3294 (2003).

[0406] In one embodiment, an antigen binding domain against RAGE-1 is an antigen binding portion, e.g., CDRs, of the antibody MAB5328 (EMD Millipore).

[0407] In one embodiment, an antigen binding domain against human telomerase reverse transcriptase is an antigen binding portion, e.g., CDRs, of the antibody cat no: LS-B95-100 (Lifespan Biosciences)

[0408] In one embodiment, an antigen binding domain against intestinal carboxyl esterase is an antigen binding portion, e.g., CDRs, of the antibody 4F12: cat no: LS-B6190-50 (Lifespan Biosciences).

[0409] In one embodiment, an antigen binding domain against mut hsp70-2 is an antigen binding portion, e.g., CDRs, of the antibody Lifespan Biosciences: monoclonal: cat no: LS-C133261-100 (Lifespan Biosciences).

[0410] In one embodiment, an antigen binding domain against CD79a is an antigen binding portion, e.g., CDRs, of the antibody Anti-CD79a antibody [HM47/A9] (ab3121), available from Abcam; antibody CD79A Antibody #3351 available from Cell Signalling Technology; or antibody HPA017748-Anti-CD79A antibody produced in rabbit, available from Sigma Aldrich.

[0411] In one embodiment, an antigen binding domain against CD79b is an antigen binding portion, e.g., CDRs, of the antibody polatuzumab vedotin, anti-CD79b described in Dornan et al., “Therapeutic potential of an anti-CD79b antibody-drug conjugate, anti-CD79b-vc-MMAE, for the treatment of non-Hodgkin lymphoma” Blood. 2009 Sep. 24; 114(13):2721-9. doi: 10.1182/blood-2009-02-205500. Epub 2009 Jul. 24, or the bispecific antibody Anti-CD79b/CD3 described in “4507 Pre-Clinical Characterization of T Cell-Dependent Bispecific Antibody Anti-CD79b/CD3 As a Potential Therapy for B Cell Malignancies” Abstracts of 56^{th} ASH Annual Meeting and Exposition, San Francisco, Calif. Dec. 6-9 2014.

[0412] In one embodiment, an antigen binding domain against CD72 is an antigen binding portion, e.g., CDRs, of the antibody J3-109 described in Myers, and Uckun, “An anti-CD72 immunotoxin against therapy-refractory B-lineage acute lymphoblastic leukemia.” Leuk Lymphoma. 1995 June; 18(1-2):119-22, or anti-CD72 (10D6.8.1, mIgG1) described in Polson et al., “Antibody-Drug Conjugates for the Treatment of Non-Hodgkin's Lymphoma: Target and Linker-Drug Selection” Cancer Res Mar. 15, 2009 69; 2358.

[0413] In one embodiment, an antigen binding domain against LAIR1 is an antigen binding portion, e.g., CDRs, of the antibody ANT-301 LAIR1 antibody, available from ProSpec; or anti-human CD305 (LAIR1) Antibody, available from BioLegend.

[0414] In one embodiment, an antigen binding domain against FCAR is an antigen binding portion, e.g., CDRs, of the antibody CD89/FCARAntibody (Catalog #10414-H08H), available from Sino Biological Inc.

[0415] In one embodiment, an antigen binding domain against LILRA2 is an antigen binding portion, e.g., CDRs, of the antibody LILRA2 monoclonal antibody (M17), clone 3C7, available from Abnova, or Mouse Anti-LILRA2 antibody, Monoclonal (2D7), available from Lifespan Biosciences.

[0416] In one embodiment, an antigen binding domain against CD300LF is an antigen binding portion, e.g., CDRs, of the antibody Mouse Anti-CMRF35-like molecule 1 antibody, Monoclonal[UP-D2], available from BioLegend, or Rat Anti-CMRF35-like molecule 1 antibody, Monoclonal[234903], available from R&D Systems.

[0417] In one embodiment, an antigen binding domain against CLEC12A is an antigen binding portion, e.g., CDRs, of the antibody Bispecific T cell Engager (BiTE) scFv-antibody and ADC described in Noordhuis et al., “Targeting of CLEC12A In Acute Myeloid Leukemia by Antibody-Drug-Conjugates and Bispecific CLL-1×CD3 BiTE Antibody” 53^{rd} ASH Annual Meeting and Exposition, Dec. 10-13, 2011, and MCLA-117 (Merus).

[0418] In one embodiment, an antigen binding domain against BST2 (also called CD317) is an antigen binding portion, e.g., CDRs, of the antibody Mouse Anti-CD317 antibody, Monoclonal[3H4], available from Antibodies-Online or Mouse Anti-CD317 antibody, Monoclonal[696739], available from R&D Systems.

[0419] In one embodiment, an antigen binding domain against EMR2 (also called CD312) is an antigen binding portion, e.g., CDRs, of the antibody Mouse Anti-CD312 antibody, Monoclonal[LS-B8033] available from Lifespan Biosciences, or Mouse Anti-CD312 antibody, Monoclonal[494025] available from R&D Systems.

[0420] In one embodiment, an antigen binding domain against LY75 is an antigen binding portion, e.g., CDRs, of the antibody Mouse Anti-Lymphocyte antigen 75 antibody, Monoclonal[HD30] available from EMD Millipore or Mouse Anti-Lymphocyte antigen 75 antibody, Monoclonal[A15797] available from Life Technologies.

[0421] In one embodiment, an antigen binding domain against GPC3 is an antigen binding portion, e.g., CDRs, of the antibody hGC33 described in Nakano K, Ishiguro T, Konishi H, et al. Generation of a humanized anti-glypican 3 antibody by CDR grafting and stability optimization. Anticancer Drugs. 2010 November; 21(10):907-916, or MDX-1414, HN3, or YP7, all three of which are described in Feng et al., “Glypican-3 antibodies: a new therapeutic target for liver cancer.” FEBS Lett. 2014 Jan. 21; 588(2):377-82.

[0422] In one embodiment, an antigen binding domain against FCRL5 is an antigen binding portion, e.g., CDRs, of the anti-FcRL5 antibody described in Elkins et al., “FcRL5 as a target of antibody-drug conjugates for the treatment of multiple myeloma” Mol Cancer Ther. 2012 October; 11(10):2222-32.

[0423] In one embodiment, an antigen binding domain against IGLL1 is an antigen binding portion, e.g., CDRs, of the antibody Mouse Anti-Immunoglobulin lambda-like polypeptide 1 antibody, Monoclonal[AT1G4] available from Lifespan Biosciences, Mouse Anti-Immunoglobulin lambda-like polypeptide 1 antibody, Monoclonal[HSL11] available from BioLegend.

[0424] In one embodiment, the antigen binding domain comprises one, two three (e.g., all three) heavy chain CDRs, HC CDR1, HC CDR2 and HC CDR3, from an antibody listed above, and/or one, two, three (e.g., all three) light chain CDRs, LC CDR1, LC CDR2 and LC CDR3, from an antibody listed above. In one embodiment, the antigen binding domain comprises a heavy chain variable region and/or a variable light chain region of an antibody listed above.

[0425] In another aspect, the antigen binding domain comprises a humanized antibody or an antibody fragment. In some aspects, a non-human antibody is humanized, where specific sequences or regions of the antibody are modified to increase similarity to an antibody naturally produced in a human or fragment thereof. In one aspect, the antigen binding domain is humanized.

[0426] A humanized antibody can be produced using a variety of techniques known in the art, including but not limited to, CDR-grafting (see, e.g., European Patent No. EP 239,400; International Publication No. WO 91/09967; and U.S. Pat. Nos. 5,225,539, 5,530,101, and 5,585,089, each of which is incorporated herein in its entirety by reference), veneering or resurfacing (see, e.g., European Patent Nos. EP 592,106 and EP 519,596; Padlan, 1991, Molecular Immunology, 28(4/5):489-498; Studnicka et al., 1994, Protein Engineering, 7(6):805-814; and Roguska et al., 1994, PNAS, 91:969-973, each of which is incorporated herein by its entirety by reference), chain shuffling (see, e.g., U.S. Pat. No. 5,565,332, which is incorporated herein in its entirety by reference), and techniques disclosed in, e.g., U.S. Patent Application Publication No. US2005/0042664, U.S. Patent Application Publication No. US2005/0048617, U.S. Pat. Nos. 6,407,213, 5,766,886, International Publication No. WO 9317105, Tan et al., J. Immunol., 169:1119-25 (2002), Caldas et al., Protein Eng., 13(5):353-60 (2000), Morea et al., Methods, 20(3):267-79 (2000), Baca et al., J. Biol. Chem., 272(16):10678-84 (1997), Roguska et al., Protein Eng., 9(10):895-904 (1996), Couto et al., Cancer Res., 55 (23 Supp):5973s-5977s (1995), Couto et al., Cancer Res., 55(8):1717-22 (1995), Sandhu J S, Gene, 150(2):409-10 (1994), and Pedersen et al., J. Mol. Biol., 235(3):959-73 (1994), each of which is incorporated herein in its entirety by reference. Often, framework residues in the framework regions will be substituted with the corresponding residue from the CDR donor antibody to alter, for example improve, antigen binding. These framework substitutions are identified by methods well-known in the art, e.g., by modeling of the interactions of the CDR and framework residues to identify framework residues important for antigen binding and sequence comparison to identify unusual framework residues at particular positions. (See, e.g., Queen et al., U.S. Pat. No. 5,585,089; and Riechmann et al., 1988, Nature, 332:323, which are incorporated herein by reference in their entireties.)

[0427] A humanized antibody or antibody fragment has one or more amino acid residues remaining in it from a source which is nonhuman. These nonhuman amino acid residues are often referred to as “import” residues, which are typically taken from an “import” variable domain. As provided herein, humanized antibodies or antibody fragments comprise one or more CDRs from nonhuman immunoglobulin molecules and framework regions wherein the amino acid residues comprising the framework are derived completely or mostly from human germline. Multiple techniques for humanization of antibodies or antibody fragments are well-known in the art and can essentially be performed following the method of Winter and co-workers (Jones et al., Nature, 321:522-525 (1986); Riechmann et al., Nature, 332:323-327 (1988); Verhoeyen et al., Science, 239:1534-1536 (1988)), by substituting rodent CDRs or CDR sequences for the corresponding sequences of a human antibody, i.e., CDR-grafting (EP 239,400; PCT Publication No. WO 91/09967; and U.S. Pat. Nos. 4,816,567; 6,331,415; 5,225,539; 5,530,101; 5,585,089; 6,548,640, the contents of which are incorporated herein by reference herein in their entirety). In such humanized antibodies and antibody fragments, substantially less than an intact human variable domain has been substituted by the corresponding sequence from a nonhuman species. Humanized antibodies are often human antibodies in which some CDR residues and possibly some framework (FR) residues are substituted by residues from analogous sites in rodent antibodies. Humanization of antibodies and antibody fragments can also be achieved by veneering or resurfacing (EP 592,106; EP 519,596; Padlan, 1991, Molecular Immunology, 28(4/5):489-498; Studnicka et al., Protein Engineering, 7(6):805-814 (1994); and Roguska et al., PNAS, 91:969-973 (1994)) or chain shuffling (U.S. Pat. No. 5,565,332), the contents of which are incorporated herein by reference herein in their entirety.

[0428] The choice of human variable domains, both light and heavy, to be used in making the humanized antibodies is to reduce antigenicity. According to the so-called “best-fit” method, the sequence of the variable domain of a rodent antibody is screened against the entire library of known human variable-domain sequences. The human sequence which is closest to that of the rodent is then accepted as the human framework (FR) for the humanized antibody (Sims et al., J. Immunol., 151:2296 (1993); Chothia et al., J. Mol. Biol., 196:901 (1987), the contents of which are incorporated herein by reference herein in their entirety). Another method uses a particular framework derived from the consensus sequence of all human antibodies of a particular subgroup of light or heavy chains. The same framework may be used for several different humanized antibodies (see, e.g., Nicholson et al. Mol. Immun. 34 (16-17): 1157-1165 (1997); Carter et al., Proc. Natl. Acad. Sci. USA, 89:4285 (1992); Presta et al., J. Immunol., 151:2623 (1993), the contents of which are incorporated herein by reference herein in their entirety). In some embodiments, the framework region, e.g., all four framework regions, of the heavy chain variable region are derived from a VH4_4-59 germline sequence. In one embodiment, the framework region can comprise, one, two, three, four or five modifications, e.g., substitutions, e.g., from the amino acid at the corresponding murine sequence. In one embodiment, the framework region, e.g., all four framework regions of the light chain variable region are derived from a VK3_1.25 germline sequence. In one embodiment, the framework region can comprise, one, two, three, four or five modifications, e.g., substitutions, e.g., from the amino acid at the corresponding murine sequence.

[0429] In some aspects, the portion of a CAR composition of the invention that comprises an antibody fragment is humanized with retention of high affinity for the target antigen and other favorable biological properties. According to one aspect of the invention, humanized antibodies and antibody fragments are prepared by a process of analysis of the parental sequences and various conceptual humanized products using three-dimensional models of the parental and humanized sequences. Three-dimensional immunoglobulin models are commonly available and are familiar to those skilled in the art. Computer programs are available which illustrate and display probable three-dimensional conformational structures of selected candidate immunoglobulin sequences. Inspection of these displays permits analysis of the likely role of the residues in the functioning of the candidate immunoglobulin sequence, e.g., the analysis of residues that influence the ability of the candidate immunoglobulin to bind the target antigen. In this way, FR residues can be selected and combined from the recipient and import sequences so that the desired antibody or antibody fragment characteristic, such as increased affinity for the target antigen, is achieved. In general, the CDR residues are directly and most substantially involved in influencing antigen binding.

[0430] A humanized antibody or antibody fragment may retain a similar antigenic specificity as the original antibody, e.g., in the present invention, the ability to bind human a cancer associated antigen as described herein. In some embodiments, a humanized antibody or antibody fragment may have improved affinity and/or specificity of binding to human a cancer associated antigen as described herein.

[0431] In one aspect, the antigen binding domain of the invention is characterized by particular functional features or properties of an antibody or antibody fragment. For example, in one aspect, the portion of a CAR composition of the invention that comprises an antigen binding domain specifically binds a tumor antigen as described herein.

[0432] In one aspect, the anti-cancer associated antigen as described herein binding domain is a fragment, e.g., a single chain variable fragment (scFv). In one aspect, the anti-cancer associated antigen as described herein binding domain is a Fv, a Fab, a (Fab′)2, or a bi-functional (e.g. bi-specific) hybrid antibody (e.g., Lanzavecchia et al., Eur. J. Immunol. 17, 105 (1987)). In one aspect, the antibodies and fragments thereof of the invention binds a cancer associated antigen as described herein protein with wild-type or enhanced affinity.

[0433] In some instances, scFvs can be prepared according to method known in the art (see, for example, Bird et al., (1988) Science 242:423-426 and Huston et al., (1988) Proc. Natl. Acad. Sci. USA 85:5879-5883). ScFv molecules can be produced by linking VH and VL regions together using flexible polypeptide linkers. The scFv molecules comprise a linker (e.g., a Ser-Gly linker) with an optimized length and/or amino acid composition. The linker length can greatly affect how the variable regions of a scFv fold and interact. In fact, if a short polypeptide linker is employed (e.g., between 5-10 amino acids) intrachain folding is prevented. Interchain folding is also required to bring the two variable regions together to form a functional epitope binding site. For examples of linker orientation and size see, e.g., Hollinger et al. 1993 Proc Natl Acad. Sci. U.S.A. 90:6444-6448, U.S. Patent Application Publication Nos. 2005/0100543, 2005/0175606, 2007/0014794, and PCT publication Nos. WO2006/020258 and WO2007/024715, is incorporated herein by reference.

[0434] An scFv can comprise a linker of at least 1, 2, 3, 4, 5, 6, 7, 8, 9, 10, 11, 12, 13, 14, 15, 16, 17, 18, 19, 20, 25, 30, 35, 40, 45, 50, or more amino acid residues between its VL and VH regions. The linker sequence may comprise any naturally occurring amino acid. In some embodiments, the linker sequence comprises amino acids glycine and serine. In another embodiment, the linker sequence comprises sets of glycine and serine repeats such as (Gly4Ser)n, where n is a positive integer equal to or greater than 1 (SEQ ID NO:22). In one embodiment, the linker can be (Gly4Ser)₄ (SEQ ID NO:29) or (Gly4Ser)₃(SEQ ID NO:30). Variation in the linker length may retain or enhance activity, giving rise to superior efficacy in activity studies.

[0435] In another aspect, the antigen binding domain is a T cell receptor (“TCR”), or a fragment thereof, for example, a single chain TCR (scTCR). Methods to make such TCRs are known in the art. See, e.g., Willemsen R A et al, Gene Therapy 7: 1369-1377 (2000); Zhang T et al, Cancer Gene Ther 11: 487-496 (2004); Aggen et al, Gene Ther. 19(4):365-74 (2012) (references are incorporated herein by its entirety). For example, scTCR can be engineered that contains the Vα and Vβ genes from a T cell clone linked by a linker (e.g., a flexible peptide). This approach is very useful to cancer associated target that itself is intracellar, however, a fragment of such antigen (peptide) is presented on the surface of the cancer cells by MHC.

[0436] In one embodiment, an antigen binding domain against EGFRvIII is an antigen binding portion, e.g., CDRs, of a CAR, antibody or antigen-binding fragment thereof described in, e.g., PCT publication WO2014/130657 or US2014/0322275A1. In one embodiment, the CAR molecule comprises an EGFRvIII CAR, or an antigen binding domain according to Table 2 or SEQ ID NO:11 of WO 2014/130657, incorporated herein by reference, or a sequence substantially identical thereto (e.g., at least 85%, 90%, 95% or more identical thereto). The amino acid and nucleotide sequences encoding the EGFRvIII CAR molecules and antigen binding domains (e.g., including one, two, three VH CDRs; and one, two, three VL CDRs according to Kabat or Chothia), are specified in WO 2014/130657.

[0437] In one embodiment, an antigen binding domain against mesothelin is an antigen binding portion, e.g., CDRs, of an antibody, antigen-binding fragment or CAR described in, e.g., PCT publication WO2015/090230. In one embodiment, an antigen binding domain against mesothelin is an antigen binding portion, e.g., CDRs, of an antibody, antigen-binding fragment, or CAR described in, e.g., PCT publication WO1997/025068, WO1999/028471, WO2005/014652, WO2006/099141, WO2009/045957, WO2009/068204, WO2013/142034, WO2013/040557, or WO2013/063419.

[0438] In an embodiment, the CAR molecule comprises a mesothelin CAR described herein, e.g., a mesothelin CAR described in WO 2015/090230, incorporated herein by reference. In some embodiments, the mesothelin CAR comprises an amino acid, or has a nucleotide sequence shown in WO 2015/090230 incorporated herein by reference, or a sequence substantially identical to any of the aforesaid sequences (e.g., at least 85%, 90%, 95% or more identical to any of the aforesaid mesothelin CAR sequences). In one embodiment, the CAR molecule comprises a mesothelin CAR, or an antigen binding domain according to Tables 2-3 of WO 2015/090230, incorporated herein by reference, or a sequence substantially identical thereto (e.g., at least 85%, 90%, 95% or more identical thereto). The amino acid and nucleotide sequences encoding the mesothelin CAR molecules and antigen binding domains (e.g., including one, two, three VH CDRs; and one, two, three VL CDRs according to Kabat or Chothia), are specified in WO 2015/090230.

[0439] In one embodiment, an antigen binding domain against CD123 is an antigen binding portion, e.g., CDRs, of an antibody, antigen-binding fragment or CAR described in, e.g., PCT publication WO2016/028896. In one embodiment, an antigen binding domain against CD123 is an antigen binding portion, e.g., CDRs, of an antibody, antigen-binding fragment or CAR described in, e.g., PCT publication WO2014/130635. In one embodiment, an antigen binding domain against CD123 is an antigen binding portion, e.g., CDRs, of an antibody, antigen-binding fragment, or CAR described in, e.g., PCT publication WO2014/138805, WO2014/138819, WO2013/173820, WO2014/144622, WO2001/66139, WO2010/126066, WO2014/144622, or US2009/0252742.

[0440] In one embodiment, an antigen binding domain against CD123 is an antigen binding portion, e.g., CDRs, of an antibody, antigen-binding fragment or CAR described in, e.g., US2014/0322212A1 or US2016/0068601A1, both incorporated herein by reference. In some embodiments, the CD123 CAR comprises an amino acid, or has a nucleotide sequence shown in US2014/0322212A1 or US2016/0068601A1, both incorporated herein by reference, or a sequence substantially identical to any of the aforesaid sequences (e.g., at least 85%, 90%, 95% or more identical to any of the aforesaid CD123 CAR sequences). In one embodiment, the CAR molecule comprises a CD123 CAR (e.g., any of the CAR1-CARE), or an antigen binding domain according to Tables 1-2 of WO 2014/130635, incorporated herein by reference, or a sequence substantially identical thereto (e.g., at least 85%, 90%, 95% or more identical to any of the aforesaid CD123 CAR sequences). The amino acid and nucleotide sequences encoding the CD123 CAR molecules and antigen binding domains (e.g., including one, two, three VH CDRs; and one, two, three VL CDRs according to Kabat or Chothia), are specified in WO 2014/130635.

[0441] In other embodiments, the CAR molecule comprises a CD123 CAR comprises a CAR molecule (e.g., any of the CAR123-1 to CAR123-4 and hzCAR123-1 to hzCAR123-32), or an antigen binding domain according to Tables 2, 6, and 9 of WO2016/028896, incorporated herein by reference, or a sequence substantially identical thereto (e.g., at least 85%, 90%, 95% or more identical to any of the aforesaid CD123 CAR sequences). The amino acid and nucleotide sequences encoding the CD123 CAR molecules and antigen binding domains (e.g., including one, two, three VH CDRs; and one, two, three VL CDRs according to Kabat or Chothia), are specified in WO2016/028896.

[0442] In one embodiment, an antigen binding domain against CD22 is an antigen binding portion, e.g., CDRs, of an antibody described in, e.g., Haso et al., Blood, 121(7): 1165-1174 (2013); Wayne et al., Clin Cancer Res 16(6): 1894-1903 (2010); Kato et al., Leuk Res 37(1):83-88 (2013); Creative BioMart (creativebiomart.net): MOM-18047-S(P).

[0443] In one embodiment, an antigen binding domain against CS-1 is an antigen binding portion, e.g., CDRs, of Elotuzumab (BMS), see e.g., Tai et al., 2008, Blood 112(4):1329-37; Tai et al., 2007, Blood. 110(5):1656-63.

[0444] In one embodiment, an antigen binding domain against CLL-1 is an antigen binding portion, e.g., CDRs, of an antibody available from R&D, ebiosciences, Abcam, for example, PE-CLL1-hu Cat #353604 (BioLegend); and PE-CLL1 (CLEC12A) Cat #562566 (BD).

[0445] In other embodiments, the CLL1 CAR includes a CAR molecule, or an antigen binding domain according to Table 2 of WO2016/014535, incorporated herein by reference. The amino acid and nucleotide sequences encoding the CLL-1 CAR molecules and antigen binding domains (e.g., including one, two, three VH CDRs; and one, two, three VL CDRs according to Kabat or Chothia), are specified in WO2016/014535.

[0446] In one embodiment, an antigen binding domain against CD33 is an antigen binding portion, e.g., CDRs, of an antibody described in, e.g., Bross et al., Clin Cancer Res 7(6):1490-1496 (2001) (Gemtuzumab Ozogamicin, hP67.6), Caron et al., Cancer Res 52(24):6761-6767 (1992) (Lintuzumab, HuM195), Lapusan et al., Invest New Drugs 30(3):1121-1131 (2012) (AVE9633), Aigner et al., Leukemia 27(5): 1107-1115 (2013) (AMG330, CD33 BiTE), Dutour et al., Adv hematol 2012:683065 (2012), and Pizzitola et al., Leukemia doi:10.1038/Lue.2014.62 (2014).

[0447] In one embodiment, an antigen binding domain against CD33 is an antigen binding portion, e.g., CDRs, of an antibody described in, US2016/0096892A1, incorporated herein by reference. In some embodiments, the CD33 CAR comprises an amino acid, or has a nucleotide sequence shown in US2016/0096892A1, incorporated herein by reference, or a sequence substantially identical to any of the aforesaid sequences (e.g., at least 85%, 90%, 95% or more identical to any of the aforesaid CD33 CAR sequences). In other embodiments, the CD33 CAR CAR or antigen binding domain thereof can include a CAR molecule (e.g., any of CAR33-1 to CAR-33-9), or an antigen binding domain according to Table 2 or 9 of WO2016/014576, incorporated herein by reference, or a sequence substantially identical to any of the aforesaid sequences (e.g., at least 85%, 90%, 95% or more identical to any of the aforesaid CD33 CAR sequences). The amino acid and nucleotide sequences encoding the CD33 CAR molecules and antigen binding domains (e.g., including one, two, three VH CDRs; and one, two, three VL CDRs according to Kabat or Chothia), are specified in WO2016/014576.

[0448] In one embodiment, an antigen binding domain against GD2 is an antigen binding portion, e.g., CDRs, of an antibody described in, e.g., Mujoo et al., Cancer Res. 47(4):1098-1104 (1987); Cheung et al., Cancer Res 45(6):2642-2649 (1985), Cheung et al., J Clin Oncol 5(9):1430-1440 (1987), Cheung et al., J Clin Oncol 16(9):3053-3060 (1998), Handgretinger et al., Cancer Immunol Immunother 35(3):199-204 (1992). In some embodiments, an antigen binding domain against GD2 is an antigen binding portion of an antibody selected from mAb 14.18, 14G2a, ch14.18, hu14.18, 3F8, hu3F8, 3G6, 8B6, 60C3, 10B8, ME36.1, and 8H9, see e.g., WO2012033885, WO2013040371, WO2013192294, WO2013061273, WO2013123061, WO2013074916, and WO201385552. In some embodiments, an antigen binding domain against GD2 is an antigen binding portion of an antibody described in US Publication No.: 20100150910 or PCT Publication No.: WO 2011160119.

[0449] In one embodiment, an antigen binding domain against BCMA is an antigen binding portion, e.g., CDRs, of an antibody, antigen-binding fragment or CAR described in, e.g., PCT publication WO2016/014565, e.g., the antigen binding portion of CAR BCMA-10 as described in WO2016/014565. In one embodiment, an antigen binding domain against BCMA is an antigen binding portion, e.g., CDRs, of an antibody, antigen-binding fragment or CAR described in, e.g., PCT publication WO2016/014789. In one embodiment, an antigen binding domain against BCMA is an antigen binding portion, e.g., CDRs, of an antibody described in, e.g., WO2012/163805, WO2001/12812, and WO2003/062401.

[0450] In other embodiment, the CAR molecule comprises a BCMA CAR molecule, or an antigen binding domain against BCMA described herein, e.g., a BCMA CAR described in US-2016-0046724-A1 or WO2016/014565. In some embodiments, the BCMA CAR comprises an amino acid, or has a nucleotide sequence of a CAR molecule, or an antigen binding domain according to US-2016-0046724-A1, or Table 1 or 16, SEQ ID NO: 271 or SEQ ID NO: 273 of WO2016/014565, incorporated herein by reference, or a sequence substantially identical to any of the aforesaid sequences (e.g., at least 85%, 90%, 95% or more identical to any of the aforesaid BCMA CAR sequences). The amino acid and nucleotide sequences encoding the BCMA CAR molecules and antigen binding domains (e.g., including one, two, three VH CDRs; and one, two, three VL CDRs according to Kabat or Chothia), are specified in WO2016/014565.

[0451] In one embodiment, an antigen binding domain against GFR ALPHA-4 CAR antigen is an antigen binding portion, e.g., CDRs, of an antibody described in, e.g., WO2016/025880, incorporated herein by reference. In one embodiment, the CAR molecule comprises an a GFR ALPHA-4 CAR, e.g., a CAR molecule, or an antigen binding domain according to Table 2 of WO2016/025880, incorporated herein by reference, or a sequence substantially identical to any of the aforesaid sequences (e.g., at least 85%, 90%, 95% or more identical to any of the aforesaid GFR ALPHA-4 sequences). The amino acid and nucleotide sequences encoding the GFR ALPHA-4 CAR molecules and antigen binding domains (e.g., including one, two, three VH CDRs; and one, two, three VL CDRs according to Kabat or Chothia), are specified in WO2016/025880.

[0452] In one embodiment, an antigen binding domain against Tn antigen is an antigen binding portion, e.g., CDRs, of an antibody described in, e.g., U.S. Pat. No. 8,440,798; Brooks et al., PNAS 107(22):10056-10061 (2010), and Stone et al., Oncolmmunology 1(6):863-873(2012).

[0453] In one embodiment, an antigen binding domain against PSMA is an antigen binding portion, e.g., CDRs, of an antibody described in, e.g., Parker et al., Protein Expr Purif 89(2):136-145 (2013), US 20110268656 (J591 ScFv); Frigerio et al, European J Cancer 49(9):2223-2232 (2013) (scFvD2B); WO 2006125481 (mAbs 3/A12, 3/E7 and 3/F11) and single chain antibody fragments (scFv A5 and D7).

[0454] In one embodiment, an antigen binding domain against ROR1 is an antigen binding portion, e.g., CDRs, of an antibody described in, e.g., Hudecek et al., Clin Cancer Res 19(12):3153-3164 (2013); WO 2011159847; and US20130101607.

[0455] In one embodiment, an antigen binding domain against FLT3 is an antigen binding portion, e.g., CDRs, of an antibody described in, e.g., WO2011076922, U.S. Pat. No. 5,777,084, EP0754230, US20090297529, and several commercial catalog antibodies (R&D, ebiosciences, Abcam).

[0456] In one embodiment, an antigen binding domain against TAG72 is an antigen binding portion, e.g., CDRs, of an antibody described in, e.g., Hombach et al., Gastroenterology 113(4):1163-1170 (1997); and Abcam ab691.

[0457] In one embodiment, an antigen binding domain against FAP is an antigen binding portion, e.g., CDRs, of an antibody described in, e.g., Ostermann et al., Clinical Cancer Research 14:4584-4592 (2008) (FAPS), US Pat. Publication No. 2009/0304718; sibrotuzumab (see e.g., Hofheinz et al., Oncology Research and Treatment 26(1), 2003); and Tran et al., J Exp Med 210(6):1125-1135 (2013).

[0458] In one embodiment, an antigen binding domain against CD38 is an antigen binding portion, e.g., CDRs, of daratumumab (see, e.g., Groen et al., Blood 116(21):1261-1262 (2010); MOR202 (see, e.g., U.S. Pat. No. 8,263,746); or antibodies described in U.S. Pat. No. 8,362,211.

[0459] In one embodiment, an antigen binding domain against CD44v6 is an antigen binding portion, e.g., CDRs, of an antibody described in, e.g., Casucci et al., Blood 122(20):3461-3472 (2013).

[0460] In one embodiment, an antigen binding domain against CEA is an antigen binding portion, e.g., CDRs, of an antibody described in, e.g., Chmielewski et al., Gastoenterology 143(4):1095-1107 (2012).

[0461] In one embodiment, an antigen binding domain against EPCAM is an antigen binding portion, e.g., CDRS, of an antibody selected from MT110, EpCAM-CD3 bispecific Ab (see, e.g., clinicaltrials.gov/ct2/show/NCT00635596); Edrecolomab; 3622W94; ING-1; and adecatumumab (MT201).

[0462] In one embodiment, an antigen binding domain against PRSS21 is an antigen binding portion, e.g., CDRs, of an antibody described in U.S. Pat. No. 8,080,650.

[0463] In one embodiment, an antigen binding domain against B7H3 is an antigen binding portion, e.g., CDRs, of an antibody MGA271 (Macrogenics).

[0464] In one embodiment, an antigen binding domain against KIT is an antigen binding portion, e.g., CDRs, of an antibody described in, e.g., U.S. Pat. No. 7,915,391, US20120288506, and several commercial catalog antibodies.

[0465] In one embodiment, an antigen binding domain against IL-13Ra2 is an antigen binding portion, e.g., CDRs, of an antibody described in, e.g., WO2008/146911, WO2004087758, several commercial catalog antibodies, and WO2004087758.

[0466] In one embodiment, an antigen binding domain against CD30 is an antigen binding portion, e.g., CDRs, of an antibody described in, e.g., U.S. Pat. No. 7,090,843 B1, and EP0805871.

[0467] In one embodiment, an antigen binding domain against GD3 is an antigen binding portion, e.g., CDRs, of an antibody described in, e.g., U.S. Pat. Nos. 7,253,263; 8,207,308; US 20120276046; EP1013761; WO2005035577; and U.S. Pat. No. 6,437,098.

[0468] In one embodiment, an antigen binding domain against CD171 is an antigen binding portion, e.g., CDRs, of an antibody described in, e.g., Hong et al., J Immunother 37(2):93-104 (2014).

[0469] In one embodiment, an antigen binding domain against IL-11Ra is an antigen binding portion, e.g., CDRs, of an antibody available from Abcam (cat # ab55262) or Novus Biologicals (cat # EPR5446). In another embodiment, an antigen binding domain again IL-11Ra is a peptide, see, e.g., Huang et al., Cancer Res 72(1):271-281 (2012).

[0470] In one embodiment, an antigen binding domain against PSCA is an antigen binding portion, e.g., CDRs, of an antibody described in, e.g., Morgenroth et al., Prostate 67(10):1121-1131 (2007) (scFv 7F5); Nejatollahi et al., J of Oncology 2013(2013), article ID 839831 (scFv C5-II); and US Pat Publication No. 20090311181.

[0471] In one embodiment, an antigen binding domain against VEGFR2 is an antigen binding portion, e.g., CDRs, of an antibody described in, e.g., Chinnasamy et al., J Clin Invest 120(11):3953-3968 (2010).

[0472] In one embodiment, an antigen binding domain against LewisY is an antigen binding portion, e.g., CDRs, of an antibody described in, e.g., Kelly et al., Cancer Biother Radiopharm 23(4):411-423 (2008) (hu3S193 Ab (scFvs)); Dolezal et al., Protein Engineering 16(1):47-56 (2003) (NC10 scFv).

[0473] In one embodiment, an antigen binding domain against CD24 is an antigen binding portion, e.g., CDRs, of an antibody described in, e.g., Maliar et al., Gastroenterology 143(5):1375-1384 (2012).

[0474] In one embodiment, an antigen binding domain against PDGFR-beta is an antigen binding portion, e.g., CDRs, of an antibody Abcam ab32570.

[0475] In one embodiment, an antigen binding domain against SSEA-4 is an antigen binding portion, e.g., CDRs, of antibody MC813 (Cell Signaling), or other commercially available antibodies.

[0476] In one embodiment, an antigen binding domain against CD20 is an antigen binding portion, e.g., CDRs, of the antibody Rituximab, Ofatumumab, Ocrelizumab, Veltuzumab, or GA101.

[0477] In one embodiment, an antigen binding domain against Folate receptor alpha is an antigen binding portion, e.g., CDRs, of the antibody IMGN853, or an antibody described in US20120009181; U.S. Pat. No. 4,851,332, LK26: U.S. Pat. No. 5,952,484.

[0478] In one embodiment, an antigen binding domain against ERBB2 (Her2/neu) is an antigen binding portion, e.g., CDRs, of the antibody trastuzumab, or pertuzumab.

[0479] In one embodiment, an antigen binding domain against MUC1 is an antigen binding portion, e.g., CDRs, of the antibody SAR566658.

[0480] In one embodiment, the antigen binding domain against EGFR is antigen binding portion, e.g., CDRs, of the antibody cetuximab, panitumumab, zalutumumab, nimotuzumab, or matuzumab.

[0481] In one embodiment, an antigen binding domain against NCAM is an antigen binding portion, e.g., CDRs, of the antibody clone 2-2B: MAB5324 (EMD Millipore).

[0482] In one embodiment, an antigen binding domain against Ephrin B2 is an antigen binding portion, e.g., CDRs, of an antibody described in, e.g., Abengozar et al., Blood 119(19):4565-4576 (2012).

[0483] In one embodiment, an antigen binding domain against IGF-I receptor is an antigen binding portion, e.g., CDRs, of an antibody described in, e.g., U.S. Pat. No. 8,344,112 B2; EP2322550 A1; WO 2006/138315, or PCT/US2006/022995.

[0484] In one embodiment, an antigen binding domain against CAIX is an antigen binding portion, e.g., CDRs, of the antibody clone 303123 (R&D Systems).

[0485] In one embodiment, an antigen binding domain against LMP2 is an antigen binding portion, e.g., CDRs, of an antibody described in, e.g., U.S. Pat. No. 7,410,640, or US20050129701.

[0486] In one embodiment, an antigen binding domain against gp100 is an antigen binding portion, e.g., CDRs, of the antibody HMB45, NKIbetaB, or an antibody described in WO2013165940, or US20130295007

[0487] In one embodiment, an antigen binding domain against tyrosinase is an antigen binding portion, e.g., CDRs, of an antibody described in, e.g., U.S. Pat. No. 5,843,674; or US19950504048.

[0488] In one embodiment, an antigen binding domain against EphA2 is an antigen binding portion, e.g., CDRs, of an antibody described in, e.g., Yu et al., Mol Ther 22(1):102-111 (2014).

[0489] In one embodiment, an antigen binding domain against GD3 is an antigen binding portion, e.g., CDRs, of an antibody described in, e.g., U.S. Pat. Nos. 7,253,263; 8,207,308; US 20120276046; EP1013761 A3; 20120276046; WO2005035577; or U.S. Pat. No. 6,437,098.

[0490] In one embodiment, an antigen binding domain against fucosyl GM1 is an antigen binding portion, e.g., CDRs, of an antibody described in, e.g., US20100297138; or WO2007/067992.

[0491] In one embodiment, an antigen binding domain against sLe is an antigen binding portion, e.g., CDRs, of the antibody G193 (for lewis Y), see Scott A M et al, Cancer Res 60: 3254-61 (2000), also as described in Neeson et al, J Immunol May 2013 190 (Meeting Abstract Supplement) 177.10.

[0492] In one embodiment, an antigen binding domain against GM3 is an antigen binding portion, e.g., CDRs, of the antibody CA 2523449 (mAb 14F7).

[0493] In one embodiment, an antigen binding domain against HMWMAA is an antigen binding portion, e.g., CDRs, of an antibody described in, e.g., Kmiecik et al., Oncoimmunology 3(1):e27185 (2014) (PMID: 24575382) (mAb9.2.27); U.S. Pat. No. 6,528,481; WO2010033866; or US 20140004124.

[0494] In one embodiment, an antigen binding domain against o-acetyl-GD2 is an antigen binding portion, e.g., CDRs, of the antibody 8B6.

[0495] In one embodiment, an antigen binding domain against TEM1/CD248 is an antigen binding portion, e.g., CDRs, of an antibody described in, e.g., Marty et al., Cancer Lett 235(2):298-308 (2006); Zhao et al., J Immunol Methods 363(2):221-232 (2011).

[0496] In one embodiment, an antigen binding domain against CLDN6 is an antigen binding portion, e.g., CDRs, of the antibody IMAB027 (Ganymed Pharmaceuticals), see e.g., clinicaltrial.gov/show/NCT02054351.

[0497] In one embodiment, an antigen binding domain against TSHR is an antigen binding portion, e.g., CDRs, of an antibody described in, e.g., U.S. Pat. Nos. 8,603,466; 8,501,415; or U.S. Pat. No. 8,309,693.

[0498] In one embodiment, an antigen binding domain against GPRC5D is an antigen binding portion, e.g., CDRs, of the antibody FAB6300A (R&D Systems); or LS-A4180 (Lifespan Biosciences).

[0499] In one embodiment, an antigen binding domain against CD97 is an antigen binding portion, e.g., CDRs, of an antibody described in, e.g., U.S. Pat. No. 6,846,911; de Groot et al., J Immunol 183(6):4127-4134 (2009); or an antibody from R&D:MAB3734.

[0500] In one embodiment, an antigen binding domain against ALK is an antigen binding portion, e.g., CDRs, of an antibody described in, e.g., Mino-Kenudson et al., Clin Cancer Res 16(5):1561-1571 (2010).

[0501] In one embodiment, an antigen binding domain against polysialic acid is an antigen binding portion, e.g., CDRs, of an antibody described in, e.g., Nagae et al., J Biol Chem 288(47):33784-33796 (2013).

[0502] In one embodiment, an antigen binding domain against PLAC1 is an antigen binding portion, e.g., CDRs, of an antibody described in, e.g., Ghods et al., Biotechnol Appl Biochem 2013 doi:10.1002/bab.1177.

[0503] In one embodiment, an antigen binding domain against GloboH is an antigen binding portion of the antibody VK9; or an antibody described in, e.g., Kudryashov V et al, Glycoconj J.15(3):243-9 (1998), Lou et al., Proc Natl Acad Sci USA 111(7):2482-2487 (2014); MBr1: Bremer E-G et al. J Biol Chem 259:14773-14777 (1984).

[0504] In one embodiment, an antigen binding domain against NY-BR-1 is an antigen binding portion, e.g., CDRs of an antibody described in, e.g., Jager et al., Appl Immunohistochem Mol Morphol 15(1):77-83 (2007).

[0505] In one embodiment, an antigen binding domain against WT-1 is an antigen binding portion, e.g., CDRs, of an antibody described in, e.g., Dao et al., Sci Transl Med 5(176):176ra33 (2013); or WO2012/135854.

[0506] In one embodiment, an antigen binding domain against MAGE-A1 is an antigen binding portion, e.g., CDRs, of an antibody described in, e.g., Willemsen et al., J Immunol 174(12):7853-7858 (2005) (TCR-like scFv).

[0507] In one embodiment, an antigen binding domain against sperm protein 17 is an antigen binding portion, e.g., CDRs, of an antibody described in, e.g., Song et al., Target Oncol 2013 Aug. 14 (PMID: 23943313); Song et al., Med Oncol 29(4):2923-2931 (2012).

[0508] In one embodiment, an antigen binding domain against Tie 2 is an antigen binding portion, e.g., CDRs, of the antibody AB33 (Cell Signaling Technology).

[0509] In one embodiment, an antigen binding domain against MAD-CT-2 is an antigen binding portion, e.g., CDRs, of an antibody described in, e.g., PMID: 2450952; U.S. Pat. No. 7,635,753.

[0510] In one embodiment, an antigen binding domain against Fos-related antigen 1 is an antigen binding portion, e.g., CDRs, of the antibody 12F9 (Novus Biologicals).

[0511] In one embodiment, an antigen binding domain against MelanA/MART1 is an antigen binding portion, e.g., CDRs, of an antibody described in, EP2514766 A2; or U.S. Pat. No. 7,749,719.

[0512] In one embodiment, an antigen binding domain against sarcoma translocation breakpoints is an antigen binding portion, e.g., CDRs, of an antibody described in, e.g., Luo et al, EMBO Mol. Med. 4(6):453-461 (2012).

[0513] In one embodiment, an antigen binding domain against TRP-2 is an antigen binding portion, e.g., CDRs, of an antibody described in, e.g., Wang et al, J Exp Med. 184(6):2207-16 (1996).

[0514] In one embodiment, an antigen binding domain against CYP1B1 is an antigen binding portion, e.g., CDRs, of an antibody described in, e.g., Maecker et al, Blood 102 (9): 3287-3294 (2003).

[0515] In one embodiment, an antigen binding domain against RAGE-1 is an antigen binding portion, e.g., CDRs, of the antibody MAB5328 (EMD Millipore).

[0516] In one embodiment, an antigen binding domain against human telomerase reverse transcriptase is an antigen binding portion, e.g., CDRs, of the antibody cat no: LS-B95-100 (Lifespan Biosciences)

[0517] In one embodiment, an antigen binding domain against intestinal carboxyl esterase is an antigen binding portion, e.g., CDRs, of the antibody 4F12: cat no: LS-B6190-50 (Lifespan Biosciences).

[0518] In one embodiment, an antigen binding domain against mut hsp70-2 is an antigen binding portion, e.g., CDRs, of the antibody Lifespan Biosciences: monoclonal: cat no: LS-C133261-100 (Lifespan Biosciences).

[0519] In one embodiment, an antigen binding domain against CD79a is an antigen binding portion, e.g., CDRs, of the antibody Anti-CD79a antibody [HM47/A9] (ab3121), available from Abcam; antibody CD79A Antibody #3351 available from Cell Signalling Technology; or antibody HPA017748-Anti-CD79A antibody produced in rabbit, available from Sigma Aldrich.

[0520] In one embodiment, an antigen binding domain against CD79b is an antigen binding portion, e.g., CDRs, of the antibody polatuzumab vedotin, anti-CD79b described in Dornan et al., “Therapeutic potential of an anti-CD79b antibody-drug conjugate, anti-CD79b-vc-MMAE, for the treatment of non-Hodgkin lymphoma” Blood. 2009 Sep. 24; 114(13):2721-9. doi:

[0521] 10.1182/blood-2009-02-205500. Epub 2009 Jul. 24, or the bispecific antibody Anti-CD79b/CD3 described in “4507 Pre-Clinical Characterization of T Cell-Dependent Bispecific Antibody Anti-CD79b/CD3 As a Potential Therapy for B Cell Malignancies” Abstracts of 56^{th} ASH Annual Meeting and Exposition, San Francisco, Calif. Dec. 6-9 2014.

[0522] In one embodiment, an antigen binding domain against CD72 is an antigen binding portion, e.g., CDRs, of the antibody J3-109 described in Myers, and Uckun, “An anti-CD72 immunotoxin against therapy-refractory B-lineage acute lymphoblastic leukemia.” Leuk Lymphoma. 1995 June; 18(1-2):119-22, or anti-CD72 (10D6.8.1, mIgG1) described in Polson et al., “Antibody-Drug Conjugates for the Treatment of Non-Hodgkin's Lymphoma: Target and Linker-Drug Selection” Cancer Res Mar. 15, 2009 69; 2358.

[0523] In one embodiment, an antigen binding domain against LAIR1 is an antigen binding portion, e.g., CDRs, of the antibody ANT-301 LAIR1 antibody, available from ProSpec; or anti-human CD305 (LAIR1) Antibody, available from BioLegend.

[0524] In one embodiment, an antigen binding domain against FCAR is an antigen binding portion, e.g., CDRs, of the antibody CD89/FCARAntibody (Catalog #10414-H08H), available from Sino Biological Inc.

[0525] In one embodiment, an antigen binding domain against LILRA2 is an antigen binding portion, e.g., CDRs, of the antibody LILRA2 monoclonal antibody (M17), clone 3C7, available from Abnova, or Mouse Anti-LILRA2 antibody, Monoclonal (2D7), available from Lifespan Biosciences.

[0526] In one embodiment, an antigen binding domain against CD300LF is an antigen binding portion, e.g., CDRs, of the antibody Mouse Anti-CMRF35-like molecule 1 antibody, Monoclonal[UP-D2], available from BioLegend, or Rat Anti-CMRF35-like molecule 1 antibody, Monoclonal[234903], available from R&D Systems.

[0527] In one embodiment, an antigen binding domain against CLEC12A is an antigen binding portion, e.g., CDRs, of the antibody Bispecific T cell Engager (BiTE) scFv-antibody and ADC described in Noordhuis et al., “Targeting of CLEC12A In Acute Myeloid Leukemia by Antibody-Drug-Conjugates and Bispecific CLL-1×CD3 BiTE Antibody” 53^{rd} ASH Annual Meeting and Exposition, Dec. 10-13, 2011, and MCLA-117 (Merus).

[0528] In one embodiment, an antigen binding domain against BST2 (also called CD317) is an antigen binding portion, e.g., CDRs, of the antibody Mouse Anti-CD317 antibody, Monoclonal[3H4], available from Antibodies-Online or Mouse Anti-CD317 antibody, Monoclonal[696739], available from R&D Systems.

[0529] In one embodiment, an antigen binding domain against EMR2 (also called CD312) is an antigen binding portion, e.g., CDRs, of the antibody Mouse Anti-CD312 antibody, Monoclonal[LS-B8033] available from Lifespan Biosciences, or Mouse Anti-CD312 antibody, Monoclonal[494025] available from R&D Systems.

[0530] In one embodiment, an antigen binding domain against LY75 is an antigen binding portion, e.g., CDRs, of the antibody Mouse Anti-Lymphocyte antigen 75 antibody, Monoclonal[HD30] available from EMD Millipore or Mouse Anti-Lymphocyte antigen 75 antibody, Monoclonal[A15797] available from Life Technologies.

[0531] In one embodiment, an antigen binding domain against GPC3 is an antigen binding portion, e.g., CDRs, of the antibody hGC33 described in Nakano K, Ishiguro T, Konishi H, et al. Generation of a humanized anti-glypican 3 antibody by CDR grafting and stability optimization. Anticancer Drugs. 2010 November; 21(10):907-916, or MDX-1414, HN3, or YP7, all three of which are described in Feng et al., “Glypican-3 antibodies: a new therapeutic target for liver cancer.” FEBS Lett. 2014 Jan. 21; 588(2):377-82.

[0532] In one embodiment, an antigen binding domain against FCRL5 is an antigen binding portion, e.g., CDRs, of the anti-FcRL5 antibody described in Elkins et al., “FcRL5 as a target of antibody-drug conjugates for the treatment of multiple myeloma” Mol Cancer Ther. 2012 October; 11(10):2222-32.

[0533] In one embodiment, an antigen binding domain against IGLL1 is an antigen binding portion, e.g., CDRs, of the antibody Mouse Anti-Immunoglobulin lambda-like polypeptide 1 antibody, Monoclonal[AT1G4] available from Lifespan Biosciences, Mouse Anti-Immunoglobulin lambda-like polypeptide 1 antibody, Monoclonal[HSL11] available from BioLegend.

[0534] In one embodiment, the antigen binding domain comprises one, two three (e.g., all three) heavy chain CDRs, HC CDR1, HC CDR2 and HC CDR3, from an antibody listed above, and/or one, two, three (e.g., all three) light chain CDRs, LC CDR1, LC CDR2 and LC CDR3, from an antibody listed above. In one embodiment, the antigen binding domain comprises a heavy chain variable region and/or a variable light chain region of an antibody listed above.

[0535] In another aspect, the antigen binding domain comprises a humanized antibody or an antibody fragment. In some aspects, a non-human antibody is humanized, where specific sequences or regions of the antibody are modified to increase similarity to an antibody naturally produced in a human or fragment thereof. In one aspect, the antigen binding domain is humanized.

[0536] Bispecific CARs

[0537] In an embodiment a multispecific antibody molecule is a bispecific antibody molecule. A bispecific antibody has specificity for no more than two antigens. A bispecific antibody molecule is characterized by a first immunoglobulin variable domain sequence which has binding specificity for a first epitope and a second immunoglobulin variable domain sequence that has binding specificity for a second epitope. In an embodiment the first and second epitopes are on the same antigen, e.g., the same protein (or subunit of a multimeric protein). In an embodiment the first and second epitopes overlap. In an embodiment the first and second epitopes do not overlap. In an embodiment the first and second epitopes are on different antigens, e.g., different proteins (or different subunits of a multimeric protein). In an embodiment a bispecific antibody molecule comprises a heavy chain variable domain sequence and a light chain variable domain sequence which have binding specificity for a first epitope and a heavy chain variable domain sequence and a light chain variable domain sequence which have binding specificity for a second epitope. In an embodiment a bispecific antibody molecule comprises a half antibody having binding specificity for a first epitope and a half antibody having binding specificity for a second epitope. In an embodiment a bispecific antibody molecule comprises a half antibody, or fragment thereof, having binding specificity for a first epitope and a half antibody, or fragment thereof, having binding specificity for a second epitope. In an embodiment a bispecific antibody molecule comprises a scFv, or fragment thereof, have binding specificity for a first epitope and a scFv, or fragment thereof, have binding specificity for a second epitope.

[0538] In certain embodiments, the antibody molecule is a multi-specific (e.g., a bispecific or a trispecific) antibody molecule. Protocols for generating bispecific or heterodimeric antibody molecules are known in the art; including but not limited to, for example, the “knob in a hole” approach described in, e.g., U.S. Pat. No. 5,731,168; the electrostatic steering Fc pairing as described in, e.g., WO 09/089004, WO 06/106905 and WO 2010/129304; Strand Exchange Engineered Domains (SEED) heterodimer formation as described in, e.g., WO 07/110205; Fab arm exchange as described in, e.g., WO 08/119353, WO 2011/131746, and WO 2013/060867; double antibody conjugate, e.g., by antibody cross-linking to generate a bi-specific structure using a heterobifunctional reagent having an amine-reactive group and a sulfhydryl reactive group as described in, e.g., U.S. Pat. No. 4,433,059; bispecific antibody determinants generated by recombining half antibodies (heavy-light chain pairs or Fabs) from different antibodies through cycle of reduction and oxidation of disulfide bonds between the two heavy chains, as described in, e.g., U.S. Pat. No. 4,444,878; trifunctional antibodies, e.g., three Fab′ fragments cross-linked through sulfhydryl reactive groups, as described in, e.g., U.S. Pat. No. 5,273,743; biosynthetic binding proteins, e.g., pair of scFvs cross-linked through C-terminal tails preferably through disulfide or amine-reactive chemical cross-linking, as described in, e.g., U.S. Pat. No. 5,534,254; bifunctional antibodies, e.g., Fab fragments with different binding specificities dimerized through leucine zippers (e.g., c-fos and c-jun) that have replaced the constant domain, as described in, e.g., U.S. Pat. No. 5,582,996; bispecific and oligospecific mono- and oligovalent receptors, e.g., VH-CH1 regions of two antibodies (two Fab fragments) linked through a polypeptide spacer between the CH1 region of one antibody and the VH region of the other antibody typically with associated light chains, as described in, e.g., U.S. Pat. No. 5,591,828; bispecific DNA-antibody conjugates, e.g., crosslinking of antibodies or Fab fragments through a double stranded piece of DNA, as described in, e.g., U.S. Pat. No. 5,635,602; bispecific fusion proteins, e.g., an expression construct containing two scFvs with a hydrophilic helical peptide linker between them and a full constant region, as described in, e.g., U.S. Pat. No. 5,637,481; multivalent and multispecific binding proteins, e.g., dimer of polypeptides having first domain with binding region of Ig heavy chain variable region, and second domain with binding region of Ig light chain variable region, generally termed diabodies (higher order structures are also encompassed creating for bispecific, trispecific, or tetraspecific molecules, as described in, e.g., U.S. Pat. No. 5,837,242; minibody constructs with linked VL and VH chains further connected with peptide spacers to an antibody hinge region and CH3 region, which can be dimerized to form bispecific/multivalent molecules, as described in, e.g., U.S. Pat. No. 5,837,821; VH and VL domains linked with a short peptide linker (e.g., 5 or 10 amino acids) or no linker at all in either orientation, which can form dimers to form bispecific diabodies; trimers and tetramers, as described in, e.g., U.S. Pat. No. 5,844,094; String of VH domains (or VL domains in family members) connected by peptide linkages with crosslinkable groups at the C-terminus further associated with VL domains to form a series of FVs (or scFvs), as described in, e.g., U.S. Pat. No. 5,864,019; and single chain binding polypeptides with both a VH and a VL domain linked through a peptide linker are combined into multivalent structures through non-covalent or chemical crosslinking to form, e.g., homobivalent, heterobivalent, trivalent, and tetravalent structures using both scFV or diabody type format, as described in, e.g., U.S. Pat. No. 5,869,620. Additional exemplary multispecific and bispecific molecules and methods of making the same are found, for example, in U.S. Pat. Nos. 5,910,573, 5,932,448, 5,959,083, 5,989,830, 6,005,079, 6,239,259, 6,294,353, 6,333,396, 6,476,198, 6,511,663, 6,670,453, 6,743,896, 6,809,185, 6,833,441, 7,129,330, 7,183,076, 7,521,056, 7,527,787, 7,534,866, 7,612,181, US2002004587A1, US2002076406A1, US2002103345A1, US2003207346A1, US2003211078A1, US2004219643A1, US2004220388A1, US2004242847A1, US2005003403A1, US2005004352A1, US2005069552A1, US2005079170A1, US2005100543A1, US2005136049A1, US2005136051A1, US2005163782A1, US2005266425A1, US2006083747A1, US2006120960A1, US2006204493A1, US2006263367A1, US2007004909A1, US2007087381A1, US2007128150A1, US2007141049A1, US2007154901A1, US2007274985A1, US2008050370A1, US2008069820A1, US2008152645A1, US2008171855A1, US2008241884A1, US2008254512A1, US2008260738A1, US2009130106A1, US2009148905A1, US2009155275A1, US2009162359A1, US2009162360A1, US2009175851A1, US2009175867A1, US2009232811A1, US2009234105A1, US2009263392A1, US2009274649A1, EP346087A2, WO0006605A2, WO02072635A2, WO04081051A1, WO06020258A2, WO2007044887A2, WO2007095338A2, WO2007137760A2, WO2008119353A1, WO2009021754A2, WO2009068630A1, WO9103493A1, WO9323537A1, WO9409131A1, WO9412625A2, WO9509917A1, WO9637621A2, WO9964460A1. The contents of the above-referenced applications are incorporated herein by reference in their entireties.

[0539] Within each antibody or antibody fragment (e.g., scFv) of a bispecific antibody molecule, the VH can be upstream or downstream of the VL. In some embodiments, the upstream antibody or antibody fragment (e.g., scFv) is arranged with its VH (VH₁) upstream of its VL (VL₁) and the downstream antibody or antibody fragment (e.g., scFv) is arranged with its VL (VL₂) upstream of its VH (VH₂), such that the overall bispecific antibody molecule has the arrangement VH₁-VL₁-VL₂-VH₂. In other embodiments, the upstream antibody or antibody fragment (e.g., scFv) is arranged with its VL (VL₁) upstream of its VH (VH₁) and the downstream antibody or antibody fragment (e.g., scFv) is arranged with its VH (VH₂) upstream of its VL (VL₂), such that the overall bispecific antibody molecule has the arrangement VL₁-VH₁-VH₂-VL₂. Optionally, a linker is disposed between the two antibodies or antibody fragments (e.g., scFvs), e.g., between VL₁ and VL₂ if the construct is arranged as VH₁-VL₁-VL₂-VH₂, or between VH₁ and VH₂ if the construct is arranged as VL₁-VH₁-VH₂-VL₂. The linker may be a linker as described herein, e.g., a (Gly4-Ser)n linker, wherein n is 1, 2, 3, 4, 5, or 6, preferably 4 (SEQ ID NO: 72). In general, the linker between the two scFvs should be long enough to avoid mispairing between the domains of the two scFvs. Optionally, a linker is disposed between the VL and VH of the first scFv. Optionally, a linker is disposed between the VL and VH of the second scFv. In constructs that have multiple linkers, any two or more of the linkers can be the same or different. Accordingly, in some embodiments, a bispecific CAR comprises VLs, VHs, and optionally one or more linkers in an arrangement as described herein.

[0540] Stability and Mutations

[0541] The stability of an antigen binding domain to a cancer associated antigen as described herein, e.g., scFv molecules (e.g., soluble scFv), can be evaluated in reference to the biophysical properties (e.g., thermal stability) of a conventional control scFv molecule or a full length antibody. In one embodiment, the humanized scFv has a thermal stability that is greater than about 0.1, about 0.25, about 0.5, about 0.75, about 1, about 1.25, about 1.5, about 1.75, about 2, about 2.5, about 3, about 3.5, about 4, about 4.5, about 5, about 5.5, about 6, about 6.5, about 7, about 7.5, about 8, about 8.5, about 9, about 9.5, about 10 degrees, about 11 degrees, about 12 degrees, about 13 degrees, about 14 degrees, or about 15 degrees Celsius than a control binding molecule (e.g. a conventional scFv molecule) in the described assays.

[0542] The improved thermal stability of the antigen binding domain to a cancer associated antigen described herein, e.g., scFv is subsequently conferred to the entire CAR construct, leading to improved therapeutic properties of the CAR construct. The thermal stability of the antigen binding domain of—a cancer associated antigen described herein, e.g., scFv, can be improved by at least about 2° C. or 3° C. as compared to a conventional antibody. In one embodiment, the antigen binding domain of—a cancer associated antigen described herein, e.g., scFv, has a 1° C. improved thermal stability as compared to a conventional antibody. In another embodiment, the antigen binding domain of a cancer associated antigen described herein, e.g., scFv, has a 2° C. improved thermal stability as compared to a conventional antibody. In another embodiment, the scFv has a 4, 5, 6, 7, 8, 9, 10, 11, 12, 13, 14, 15° C. improved thermal stability as compared to a conventional antibody. Comparisons can be made, for example, between the scFv molecules disclosed herein and scFv molecules or Fab fragments of an antibody from which the scFv VH and VL were derived. Thermal stability can be measured using methods known in the art. For example, in one embodiment, Tm can be measured. Methods for measuring Tm and other methods of determining protein stability are described in more detail below.

[0543] Mutations in scFv (arising through humanization or direct mutagenesis of the soluble scFv) can alter the stability of the scFv and improve the overall stability of the scFv and the CAR construct. Stability of the humanized scFv is compared against the murine scFv using measurements such as Tm, temperature denaturation and temperature aggregation.

[0544] The binding capacity of the mutant scFvs can be determined using assays know in the art and described herein.

[0545] In one embodiment, the antigen binding domain of—a cancer associated antigen described herein, e.g., scFv, comprises at least one mutation arising from the humanization process such that the mutated scFv confers improved stability to the CAR construct. In another embodiment, the antigen binding domain of—a cancer associated antigen described herein, e.g., scFv, comprises at least 1, 2, 3, 4, 5, 6, 7, 8, 9, 10 mutations arising from the humanization process such that the mutated scFv confers improved stability to the CAR construct.

[0546] Methods of Evaluating Protein Stability

[0547] The stability of an antigen binding domain may be assessed using, e.g., the methods described below. Such methods allow for the determination of multiple thermal unfolding transitions where the least stable domain either unfolds first or limits the overall stability threshold of a multidomain unit that unfolds cooperatively (e.g., a multidomain protein which exhibits a single unfolding transition). The least stable domain can be identified in a number of additional ways. Mutagenesis can be performed to probe which domain limits the overall stability. Additionally, protease resistance of a multidomain protein can be performed under conditions where the least stable domain is known to be intrinsically unfolded via DSC or other spectroscopic methods (Fontana, et al., (1997) Fold. Des., 2: R17-26; Dimasi et al. (2009) J. Mol. Biol. 393: 672-692). Once the least stable domain is identified, the sequence encoding this domain (or a portion thereof) may be employed as a test sequence in the methods.

[0548] a) Thermal Stability

[0549] The thermal stability of the compositions may be analyzed using a number of non-limiting biophysical or biochemical techniques known in the art. In certain embodiments, thermal stability is evaluated by analytical spectroscopy.

[0550] An exemplary analytical spectroscopy method is Differential Scanning calorimetry (DSC). DSC employs a calorimeter which is sensitive to the heat absorbances that accompany the unfolding of most proteins or protein domains (see, e.g. Sanchez-Ruiz, et al., Biochemistry, 27: 1648-52, 1988). To determine the thermal stability of a protein, a sample of the protein is inserted into the calorimeter and the temperature is raised until the Fab or scFv unfolds. The temperature at which the protein unfolds is indicative of overall protein stability.

[0551] Another exemplary analytical spectroscopy method is Circular Dichroism (CD) spectroscopy. CD spectrometry measures the optical activity of a composition as a function of increasing temperature. Circular dichroism (CD) spectroscopy measures differences in the absorption of left-handed polarized light versus right-handed polarized light which arise due to structural asymmetry. A disordered or unfolded structure results in a CD spectrum very different from that of an ordered or folded structure. The CD spectrum reflects the sensitivity of the proteins to the denaturing effects of increasing temperature and is therefore indicative of a protein's thermal stability (see van Mierlo and Steemsma, J. Biotechnol., 79(3):281-98, 2000).

[0552] Another exemplary analytical spectroscopy method for measuring thermal stability is Fluorescence Emission Spectroscopy (see van Mierlo and Steemsma, supra). Yet another exemplary analytical spectroscopy method for measuring thermal stability is Nuclear Magnetic Resonance (NMR) spectroscopy (see, e.g. van Mierlo and Steemsma, supra).

[0553] The thermal stability of a composition can be measured biochemically. An exemplary biochemical method for assessing thermal stability is a thermal challenge assay. In a “thermal challenge assay”, a composition is subjected to a range of elevated temperatures for a set period of time. For example, in one embodiment, test scFv molecules or molecules comprising scFv molecules are subject to a range of increasing temperatures, e.g., for 1-1.5 hours. The activity of the protein is then assayed by a relevant biochemical assay. For example, if the protein is a binding protein (e.g. an scFv or scFv-containing polypeptide) the binding activity of the binding protein may be determined by a functional or quantitative ELISA.

[0554] Such an assay may be done in a high-throughput format and those disclosed in the Examples using E. coli and high throughput screening. A library of antigen binding domains, e.g., that includes an antigen binding domain to—a cancer associated antigen described herein, e.g., scFv variants, may be created using methods known in the art. Antigen binding domain, e.g., to—a cancer associated antigen described herein, e.g., scFv, expression may be induced and the antigen binding domain, e.g., to—a cancer associated antigen described herein, e.g., scFv, may be subjected to thermal challenge. The challenged test samples may be assayed for binding and those antigen binding domains to—a cancer associated antigen described herein, e.g., scFvs, which are stable may be scaled up and further characterized.

[0555] Thermal stability is evaluated by measuring the melting temperature (Tm) of a composition using any of the above techniques (e.g. analytical spectroscopy techniques). The melting temperature is the temperature at the midpoint of a thermal transition curve wherein 50% of molecules of a composition are in a folded state (See e.g., Dimasi et al. (2009) J. Mol Biol. 393: 672-692). In one embodiment, Tm values for an antigen binding domain to—a cancer associated antigen described herein, e.g., scFv, are about 40° C., 41° C., 42° C., 43° C., 44° C., 45° C., 46° C., 47° C., 48° C., 49° C., 50° C., 51° C., 52° C., 53° C., 54° C., 55° C., 56° C., 57° C., 58° C., 59° C., 60° C., 61° C., 62° C., 63° C., 64° C., 65° C., 66° C., 67° C., 68° C., 69° C., 70° C., 71° C., 72° C., 73° C., 74° C., 75° C., 76° C., 77° C., 78° C., 79° C., 80° C., 81° C., 82° C., 83° C., 84° C., 85° C., 86° C., 87° C., 88° C., 89° C., 90° C., 91° C., 92° C., 93° C., 94° C., 95° C., 96° C., 97° C., 98° C., 99° C., 100° C. In one embodiment, Tm values for an IgG is about 40° C., 41° C., 42° C., 43° C., 44° C., 45° C., 46° C., 47° C., 48° C., 49° C., 50° C., 51° C., 52° C., 53° C., 54° C., 55° C., 56° C., 57° C., 58° C., 59° C., 60° C., 61° C., 62° C., 63° C., 64° C., 65° C., 66° C., 67° C., 68° C., 69° C., 70° C., 71° C., 72° C., 73° C., 74° C., 75° C., 76° C., 77° C., 78° C., 79° C., 80° C., 81° C., 82° C., 83° C., 84° C., 85° C., 86° C., 87° C., 88° C., 89° C., 90° C., 91° C., 92° C., 93° C., 94° C., 95° C., 96° C., 97° C., 98° C., 99° C., 100° C. In one embodiment, Tm values for an multivalent antibody is about 40° C., 41° C., 42° C., 43° C., 44° C., 45° C., 46° C., 47° C., 48° C., 49° C., 50° C., 51° C., 52° C., 53° C., 54° C., 55° C., 56° C., 57° C., 58° C., 59° C., 60° C., 61° C., 62° C., 63° C., 64° C., 65° C., 66° C., 67° C., 68° C., 69° C., 70° C., 71° C., 72° C., 73° C., 74° C., 75° C., 76° C., 77° C., 78° C., 79° C., 80° C., 81° C., 82° C., 83° C., 84° C., 85° C., 86° C., 87° C., 88° C., 89° C., 90° C., 91° C., 92° C., 93° C., 94° C., 95° C., 96° C., 97° C., 98° C., 99° C., 100° C.

[0556] Thermal stability is also evaluated by measuring the specific heat or heat capacity (Cp) of a composition using an analytical calorimetric technique (e.g. DSC). The specific heat of a composition is the energy (e.g. in kcal/mol) is required to rise by 1° C., the temperature of 1 mol of water. As large Cp is a hallmark of a denatured or inactive protein composition. The change in heat capacity (deltaCp) of a composition is measured by determining the specific heat of a composition before and after its thermal transition. Thermal stability may also be evaluated by measuring or determining other parameters of thermodynamic stability including Gibbs free energy of unfolding (G), enthalpy of unfolding (H), or entropy of unfolding (S). One or more of the above biochemical assays (e.g. a thermal challenge assay) are used to determine the temperature (i.e. the T_{C} value) at which 50% of the composition retains its activity (e.g. binding activity).

[0557] In addition, mutations to the antigen binding domain of a cancer associated antigen described herein, e.g., scFv, can be made to alter the thermal stability of the antigen binding domain of a cancer associated antigen described herein, e.g., scFv, as compared with the unmutated antigen binding domain of a cancer associated antigen described herein, e.g., scFv. When the humanized antigen binding domain of a cancer associated antigen described herein, e.g., scFv, is incorporated into a CAR construct, the antigen binding domain of the cancer associated antigen described herein, e.g., humanized scFv, confers thermal stability to the overall CARs of the present invention. In one embodiment, the antigen binding domain to a cancer associated antigen described herein, e.g., scFv, comprises a single mutation that confers thermal stability to the antigen binding domain of the cancer associated antigen described herein, e.g., scFv. In another embodiment, the antigen binding domain to a cancer associated antigen described herein, e.g., scFv, comprises multiple mutations that confer thermal stability to the antigen binding domain to the cancer associated antigen described herein, e.g., scFv. In one embodiment, the multiple mutations in the antigen binding domain to a cancer associated antigen described herein, e.g., scFv, have an additive effect on thermal stability of the antigen binding domain to the cancer associated antigen described herein binding domain, e.g., scFv.

[0558] b) % Aggregation

[0559] The stability of a composition can be determined by measuring its propensity to aggregate. Aggregation can be measured by a number of non-limiting biochemical or biophysical techniques. For example, the aggregation of a composition may be evaluated using chromatography, e.g. Size-Exclusion Chromatography (SEC). SEC separates molecules on the basis of size. A column is filled with semi-solid beads of a polymeric gel that will admit ions and small molecules into their interior but not large ones. When a protein composition is applied to the top of the column, the compact folded proteins (i.e. non-aggregated proteins) are distributed through a larger volume of solvent than is available to the large protein aggregates. Consequently, the large aggregates move more rapidly through the column, and in this way the mixture can be separated or fractionated into its components. Each fraction can be separately quantified (e.g. by light scattering) as it elutes from the gel. Accordingly, the % aggregation of a composition can be determined by comparing the concentration of a fraction with the total concentration of protein applied to the gel. Stable compositions elute from the column as essentially a single fraction and appear as essentially a single peak in the elution profile or chromatogram.

[0560] c) Binding Affinity

[0561] The stability of a composition can be assessed by determining its target binding affinity. A wide variety of methods for determining binding affinity are known in the art. An exemplary method for determining binding affinity employs surface plasmon resonance. Surface plasmon resonance is an optical phenomenon that allows for the analysis of real-time biospecific interactions by detection of alterations in protein concentrations within a biosensor matrix, for example using the BIAcore system (Pharmacia Biosensor AB, Uppsala, Sweden and Piscataway, N.J.). For further descriptions, see Jonsson, U., et al. (1993) Ann. Biol. Clin. 51:19-26; Jonsson, U., i (1991) Biotechniques 11:620-627; Johnsson, B., et al. (1995) J. Mol. Recognit. 8:125-131; and Johnnson, B., et al. (1991) Anal. Biochem. 198:268-277.

[0562] In one aspect, the antigen binding domain of the CAR comprises an amino acid sequence that is homologous to an antigen binding domain amino acid sequence described herein, and the antigen binding domain retains the desired functional properties of the antigen binding domain described herein.

[0563] In one specific aspect, the CAR composition of the invention comprises an antibody fragment. In a further aspect, the antibody fragment comprises an scFv.

[0564] In various aspects, the antigen binding domain of the CAR is engineered by modifying one or more amino acids within one or both variable regions (e.g., VH and/or VL), for example within one or more CDR regions and/or within one or more framework regions. In one specific aspect, the CAR composition of the invention comprises an antibody fragment. In a further aspect, the antibody fragment comprises an scFv.

[0565] It will be understood by one of ordinary skill in the art that the antibody or antibody fragment of the invention may further be modified such that they vary in amino acid sequence (e.g., from wild-type), but not in desired activity. For example, additional nucleotide substitutions leading to amino acid substitutions at “non-essential” amino acid residues may be made to the protein For example, a nonessential amino acid residue in a molecule may be replaced with another amino acid residue from the same side chain family. In another embodiment, a string of amino acids can be replaced with a structurally similar string that differs in order and/or composition of side chain family members, e.g., a conservative substitution, in which an amino acid residue is replaced with an amino acid residue having a similar side chain, may be made.

[0566] Families of amino acid residues having similar side chains have been defined in the art, including basic side chains (e.g., lysine, arginine, histidine), acidic side chains (e.g., aspartic acid, glutamic acid), uncharged polar side chains (e.g., glycine, asparagine, glutamine, serine, threonine, tyrosine, cysteine), nonpolar side chains (e.g., alanine, valine, leucine, isoleucine, proline, phenylalanine, methionine, tryptophan), beta-branched side chains (e.g., threonine, valine, isoleucine) and aromatic side chains (e.g., tyrosine, phenylalanine, tryptophan, histidine).

[0567] Percent identity in the context of two or more nucleic acids or polypeptide sequences, refers to two or more sequences that are the same. Two sequences are “substantially identical” if two sequences have a specified percentage of amino acid residues or nucleotides that are the same (e.g., 60% identity, optionally 70%, 71%. 72%. 73%, 74%, 75%, 76%, 77%, 78%, 79%, 80%, 81%, 82%, 83%, 84%, 85%, 86%, 87%, 88%, 89%, 90%, 91%, 92%, 93%, 94%, 95%, 96%, 97%, 98%, 99% identity over a specified region, or, when not specified, over the entire sequence), when compared and aligned for maximum correspondence over a comparison window, or designated region as measured using one of the following sequence comparison algorithms or by manual alignment and visual inspection. Optionally, the identity exists over a region that is at least about 50 nucleotides (or 10 amino acids) in length, or more preferably over a region that is 100 to 500 or 1000 or more nucleotides (or 20, 50, 200 or more amino acids) in length.

[0568] For sequence comparison, typically one sequence acts as a reference sequence, to which test sequences are compared. When using a sequence comparison algorithm, test and reference sequences are entered into a computer, subsequence coordinates are designated, if necessary, and sequence algorithm program parameters are designated. Default program parameters can be used, or alternative parameters can be designated. The sequence comparison algorithm then calculates the percent sequence identities for the test sequences relative to the reference sequence, based on the program parameters. Methods of alignment of sequences for comparison are well known in the art. Optimal alignment of sequences for comparison can be conducted, e.g., by the local homology algorithm of Smith and Waterman, (1970) Adv. Appl. Math. 2:482c, by the homology alignment algorithm of Needleman and Wunsch, (1970) J. Mol. Biol. 48:443, by the search for similarity method of Pearson and Lipman, (1988) Proc. Nat'l. Acad. Sci. USA 85:2444, by computerized implementations of these algorithms (GAP, BESTFIT, FASTA, and TFASTA in the Wisconsin Genetics Software Package, Genetics Computer Group, 575 Science Dr., Madison, Wis.), or by manual alignment and visual inspection (see, e.g., Brent et al., (2003) Current Protocols in Molecular Biology).

[0569] Two examples of algorithms that are suitable for determining percent sequence identity and sequence similarity are the BLAST and BLAST 2.0 algorithms, which are described in Altschul et al., (1977) Nuc. Acids Res. 25:3389-3402; and Altschul et al., (1990) J. Mol. Biol. 215:403-410, respectively. Software for performing BLAST analyses is publicly available through the National Center for Biotechnology Information.

[0570] The percent identity between two amino acid sequences can also be determined using the algorithm of E. Meyers and W. Miller, (1988) Comput. Appl. Biosci. 4:11-17) which has been incorporated into the ALIGN program (version 2.0), using a PAM120 weight residue table, a gap length penalty of 12 and a gap penalty of 4. In addition, the percent identity between two amino acid sequences can be determined using the Needleman and Wunsch (1970) J. Mol. Biol. 48:444-453) algorithm which has been incorporated into the GAP program in the GCG software package (available at www.gcg.com), using either a Blossom 62 matrix or a PAM250 matrix, and a gap weight of 16, 14, 12, 10, 8, 6, or 4 and a length weight of 1, 2, 3, 4, 5, or 6.

[0571] In one aspect, the present invention contemplates modifications of the starting antibody or fragment (e.g., scFv) amino acid sequence that generate functionally equivalent molecules. For example, the VH or VL of an antigen binding domain to—a cancer associated antigen described herein, e.g., scFv, comprised in the CAR can be modified to retain at least about 70%, 71%. 72%. 73%, 74%, 75%, 76%, 77%, 78%, 79%, 80%, 81%, 82%, 83%, 84%, 85%, 86%, 87%, 88%, 89%, 90%, 91%, 92%, 93%, 94%, 95%, 96%, 97%, 98%, 99% identity of the starting VH or VL framework region of the antigen binding domain to the cancer associated antigen described herein, e.g., scFv. The present invention contemplates modifications of the entire CAR construct, e.g., modifications in one or more amino acid sequences of the various domains of the CAR construct in order to generate functionally equivalent molecules. The CAR construct can be modified to retain at least about 70%, 71%. 72%. 73%, 74%, 75%, 76%, 77%, 78%, 79%, 80%, 81%, 82%, 83%, 84%, 85%, 86%, 87%, 88%, 89%, 90%, 91%, 92%, 93%, 94%, 95%, 96%, 97%, 98%, 99% identity of the starting CAR construct.

[0572] Transmembrane Domain

[0573] With respect to the transmembrane domain, in various embodiments, a CAR can be designed to comprise a transmembrane domain that is attached to the extracellular domain of the CAR. A transmembrane domain can include one or more additional amino acids adjacent to the transmembrane region, e.g., one or more amino acid associated with the extracellular region of the protein from which the transmembrane was derived (e.g., 1, 2, 3, 4, 5, 6, 7, 8, 9, 10 up to 15 amino acids of the extracellular region) and/or one or more additional amino acids associated with the intracellular region of the protein from which the transmembrane protein is derived (e.g., 1, 2, 3, 4, 5, 6, 7, 8, 9, 10 up to 15 amino acids of the intracellular region). In one aspect, the transmembrane domain is one that is associated with one of the other domains of the CAR, e.g., in one embodiment, the transmembrane domain may be from the same protein that the signaling domain, costimulatory domain or the hinge domain is derived from. In another aspect, the transmembrane domain is not derived from the same protein that any other domain of the CAR is derived from. In some instances, the transmembrane domain can be selected or modified by amino acid substitution to avoid binding of such domains to the transmembrane domains of the same or different surface membrane proteins, e.g., to minimize interactions with other members of the receptor complex. In one aspect, the transmembrane domain is capable of homodimerization with another CAR on the cell surface of a CAR-expressing cell. In a different aspect the amino acid sequence of the transmembrane domain may be modified or substituted so as to minimize interactions with the binding domains of the native binding partner present in the same CAR-expressing cell.

[0574] The transmembrane domain may be derived either from a natural or from a recombinant source. Where the source is natural, the domain may be derived from any membrane-bound or transmembrane protein. In one aspect the transmembrane domain is capable of signaling to the intracellular domain(s) whenever the CAR has bound to a target. A transmembrane domain of particular use in this invention may include at least the transmembrane region(s) of e.g., the alpha, beta or zeta chain of the T-cell receptor, CD28, CD3 epsilon, CD45, CD4, CD5, CD8, CD9, CD16, CD22, CD33, CD37, CD64, CD80, CD86, CD134, CD137, CD154. In some embodiments, a transmembrane domain may include at least the transmembrane region(s) of, e.g., KIRDS2, OX40, CD2, CD27, LFA-1 (CD11a, CD18), ICOS (CD278), 4-1BB (CD137), GITR, CD40, BAFFR, HVEM (LIGHTR), SLAMF7, NKp80 (KLRF1), NKp44, NKp30, NKp46, CD160, CD19, IL2R beta, IL2R gamma, IL7Rα, ITGA1, VLA1, CD49a, ITGA4, IA4, CD49D, ITGA6, VLA-6, CD49f, ITGAD, CD11d, ITGAE, CD103, ITGAL, CD11a, LFA-1, ITGAM, CD11b, ITGAX, CD11c, ITGB1, CD29, ITGB2, CD18, LFA-1, ITGB7, TNFR2, DNAM1 (CD226), SLAMF4 (CD244, 2B4), CD84, CD96 (Tactile), CEACAM1, CRTAM, Ly9 (CD229), CD160 (BY55), PSGL1, CD100 (SEMA4D), SLAMF6 (NTB-A, Ly108), SLAM (SLAMF1, CD150, IPO-3), BLAME (SLAMF8), SELPLG (CD162), LTBR, PAG/Cbp, NKG2D, NKG2C, or CD19.

[0575] In some instances, the transmembrane domain can be attached to the extracellular region of the CAR, e.g., the antigen binding domain of the CAR, via a hinge, e.g., a hinge from a human protein. For example, in one embodiment, the hinge can be a human Ig (immunoglobulin) hinge, e.g., an IgG4 hinge, an IgD hinge, a GS linker (e.g., a GS linker described herein), a KIR2DS2 hinge, or a CD8a hinge. In one embodiment, the hinge or spacer comprises (e.g., consists of) the amino acid sequence of SEQ ID NO:14. In one aspect, the transmembrane domain comprises (e.g., consists of) a transmembrane domain of SEQ ID NO: 15.

[0576] In one aspect, the hinge or spacer comprises an IgG4 hinge. For example, in one embodiment, the hinge or spacer comprises a hinge of the amino acid sequence ESKYGPPCPPCPAPEFLGGPSVFLFPPKPKDTLMISRTPEVTCVVVDVSQEDPEVQFNWY VDGVEVHNAKTKPREEQFNSTYRVVSVLTVLHQDWLNGKEYKCKVSNKGLPSSIEKTI SKAKGQPREPQVYTLPPSQEEMTKNQVSLTCLVKGFYPSDIAVEWESNGQPENNYKTTP PVLDSDGSFFLYSRLTVDKSRWQEGNVFSCSVMHEALHNHYTQKSLSLSLGKM (SEQ ID NO:45). In some embodiments, the hinge or spacer comprises a hinge encoded by a nucleotide sequence of

(SEQ ID NO: 46)

GAGAGCAAGTACGGCCCTCCCTGCCCCCCTTGCCCTGCCCCCGAGTTCCT
GGGCGGACCCAGCGTGTTCCTGTTCCCCCCCAAGCCCAAGGACACCCTGA
TGATCAGCCGGACCCCCGAGGTGACCTGTGTGGTGGTGGACGTGTCCCAG
GAGGACCCCGAGGTCCAGTTCAACTGGTACGTGGACGGCGTGGAGGTGCA
CAACGCCAAGACCAAGCCCCGGGAGGAGCAGTTCAATAGCACCTACCGGG
TGGTGTCCGTGCTGACCGTGCTGCACCAGGACTGGCTGAACGGCAAGGAA
TACAAGTGTAAGGTGTCCAACAAGGGCCTGCCCAGCAGCATCGAGAAAAC
CATCAGCAAGGCCAAGGGCCAGCCTCGGGAGCCCCAGGTGTACACCCTGC
CCCCTAGCCAAGAGGAGATGACCAAGAACCAGGTGTCCCTGACCTGCCTG
GTGAAGGGCTTCTACCCCAGCGACATCGCCGTGGAGTGGGAGAGCAACGG
CCAGCCCGAGAACAACTACAAGACCACCCCCCCTGTGCTGGACAGCGACG
GCAGCTTCTTCCTGTACAGCCGGCTGACCGTGGACAAGAGCCGGTGGCAG
GAGGGCAACGTCTTTAGCTGCTCCGTGATGCACGAGGCCCTGCACAACCA
CTACACCCAGAAGAGCCTGAGCCTGTCCCTGGGCAAGATG.

[0577] In one aspect, the hinge or spacer comprises an IgD hinge. For example, in one embodiment, the hinge or spacer comprises a hinge of the amino acid sequence RWPESPKAQASSVPTAQPQAEGSLAKATTAPATTRNTGRGGEEKKKEKEKEEQEERET KTPECPSHTQPLGVYLLTPAVQDLWLRDKATFTCFVVGSDLKDAHLTWEVAGKVPTG GVEEGLLERHSNGSQSQHSRLTLPRSLWNAGTSVTCTLNHPSLPPQRLMALREPAAQAP VKLSLNLLASSDPPEAASWLLCEVSGFSPPNILLMWLEDQREVNTS GFAPARPPPQPGST TFWAWSVLRVPAPPSPQPATYTCVVSHEDSRTLLNASRSLEVSYVTDH (SEQ ID NO:47). In some embodiments, the hinge or spacer comprises a hinge encoded by a nucleotide sequence of

(SEQ ID NO: 48)

AGGTGGCCCGAAAGTCCCAAGGCCCAGGCATCTAGTGTTCCTACTGCACA
GCCCCAGGCAGAAGGCAGCCTAGCCAAAGCTACTACTGCACCTGCCACTA
CGCGCAATACTGGCCGTGGCGGGGAGGAGAAGAAAAAGGAGAAAGAGAAA
GAAGAACAGGAAGAGAGGGAGACCAAGACCCCTGAATGTCCATCCCATAC
CCAGCCGCTGGGCGTCTATCTCTTGACTCCCGCAGTACAGGACTTGTGGC
TTAGAGATAAGGCCACCTTTACATGTTTCGTCGTGGGCTCTGACCTGAAG
GATGCCCATTTGACTTGGGAGGTTGCCGGAAAGGTACCCACAGGGGGGGT
TGAGGAAGGGTTGCTGGAGCGCCATTCCAATGGCTCTCAGAGCCAGCACT
CAAGACTCACCCTTCCGAGATCCCTGTGGAACGCCGGGACCTCTGTCACA
TGTACTCTAAATCATCCTAGCCTGCCCCCACAGCGTCTGATGGCCCTTAG
AGAGCCAGCCGCCCAGGCACCAGTTAAGCTTAGCCTGAATCTGCTCGCCA
GTAGTGATCCCCCAGAGGCCGCCAGCTGGCTCTTATGCGAAGTGTCCGGC
TTTAGCCCGCCCAACATCTTGCTCATGTGGCTGGAGGACCAGCGAGAAGT
GAACACCAGCGGCTTCGCTCCAGCCCGGCCCCCACCCCAGCCGGGTTCTA
CCACATTCTGGGCCTGGAGTGTCTTAAGGGTCCCAGCACCACCTAGCCCC
CAGCCAGCCACATACACCTGTGTTGTGTCCCATGAAGATAGCAGGACCCT
GCTAAATGCTTCTAGGAGTCTGGAGGTTTCCTACGTGACTGACCATT.

[0578] In one aspect, the transmembrane domain may be recombinant, in which case it will comprise predominantly hydrophobic residues such as leucine and valine. In one aspect a triplet of phenylalanine, tryptophan and valine can be found at each end of a recombinant transmembrane domain.

[0579] Optionally, a short oligo- or polypeptide linker, between 2 and 10 amino acids in length may form the linkage between the transmembrane domain and the cytoplasmic region of the CAR. A glycine-serine doublet provides a particularly suitable linker. For example, in one aspect, the linker comprises the amino acid sequence of GGGGSGGGGS (SEQ ID NO:49). In some embodiments, the linker is encoded by a nucleotide sequence of

(SEQ ID NO: 50)

GGTGGCGGAGGTTCTGGAGGTGGAGGTTCC.

[0580] In one aspect, the hinge or spacer comprises a KIR2DS2 hinge.

[0581] Cytoplasmic Domain

[0582] The cytoplasmic domain or region of the CAR includes an intracellular signaling domain. An intracellular signaling domain is generally responsible for activation of at least one of the normal effector functions of the immune cell in which the CAR has been introduced.

[0583] Examples of intracellular signaling domains for use in the CAR of the invention include the cytoplasmic sequences of the T cell receptor (TCR) and co-receptors that act in concert to initiate signal transduction following antigen receptor engagement, as well as any derivative or variant of these sequences and any recombinant sequence that has the same functional capability.

[0584] It is known that signals generated through the TCR alone are insufficient for full activation of the T cell and that a secondary and/or costimulatory signal is also required. Thus, T cell activation can be said to be mediated by two distinct classes of cytoplasmic signaling sequences: those that initiate antigen-dependent primary activation through the TCR (primary intracellular signaling domains) and those that act in an antigen-independent manner to provide a secondary or costimulatory signal (secondary cytoplasmic domain, e.g., a costimulatory domain).

[0585] A primary signaling domain regulates primary activation of the TCR complex either in a stimulatory way, or in an inhibitory way. Primary intracellular signaling domains that act in a stimulatory manner may contain signaling motifs which are known as immunoreceptor tyrosine-based activation motifs or ITAMs.

[0586] Examples of ITAM containing primary intracellular signaling domains that are of particular use in the invention include those of CD3 zeta, common FcR gamma (FCER1G), Fc gamma RIIa, FcR beta (Fc Epsilon Rib), CD3 gamma, CD3 delta, CD3 epsilon, CD79a, CD79b, CD278 (also known as “ICOS”), FcεRI, DAP10, DAP12, and CD66d. In one embodiment, a CAR of the invention comprises an intracellular signaling domain, e.g., a primary signaling domain of CD3-zeta.

[0587] In one embodiment, a primary signaling domain comprises a modified ITAM domain, e.g., a mutated ITAM domain which has altered (e.g., increased or decreased) activity as compared to the native ITAM domain. In one embodiment, a primary signaling domain comprises a modified ITAM-containing primary intracellular signaling domain, e.g., an optimized and/or truncated ITAM-containing primary intracellular signaling domain. In an embodiment, a primary signaling domain comprises one, two, three, four or more ITAM motifs.

[0588] Further examples of molecules containing a primary intracellular signaling domain that are of particular use in the invention include those of DAP10, DAP12, and CD32.

### Costimulatory Signaling Domain

[0589] The intracellular signalling domain of the CAR can comprise the CD3-zeta signaling domain by itself or it can be combined with any other desired intracellular signaling domain(s) useful in the context of a CAR of the invention. For example, the intracellular signaling domain of the CAR can comprise a CD3 zeta chain portion and a costimulatory signaling domain. The costimulatory signaling domain refers to a portion of the CAR comprising the intracellular domain of a costimulatory molecule. In one embodiment, the intracellular domain is designed to comprise the signaling domain of CD3-zeta and the signaling domain of CD28. In one aspect, the intracellular domain is designed to comprise the signaling domain of CD3-zeta and the signaling domain of ICOS.

[0590] A costimulatory molecule can be a cell surface molecule other than an antigen receptor or its ligands that is required for an efficient response of lymphocytes to an antigen. Examples of such molecules include CD27, CD28, 4-1BB (CD137), OX40, CD30, CD40, PD1, ICOS, lymphocyte function-associated antigen-1 (LFA-1), CD2, CD7, LIGHT, NKG2C, B7-H3, and a ligand that specifically binds with CD83, and the like. For example, CD27 costimulation has been demonstrated to enhance expansion, effector function, and survival of human CART cells in vitro and augments human T cell persistence and antitumor activity in vivo (Song et al. Blood. 2012; 119(3):696-706). Further examples of such costimulatory molecules include MHC class I molecule, TNF receptor proteins, Immunoglobulin-like proteins, cytokine receptors, integrins, signaling lymphocytic activation molecules (SLAM proteins), activating NK cell receptors, BTLA, a Toll ligand receptor, OX40, CD2, CD7, CD27, CD28, CD30, CD40, CDS, ICAM-1, LFA-1 (CD11a/CD18), 4-1BB (CD137), B7-H3, CDS, ICAM-1, ICOS (CD278), GITR, BAFFR, LIGHT, HVEM (LIGHTR), KIRDS2, SLAMF7, NKp80 (KLRF1), NKp44, NKp30, NKp46, CD19, CD4, CD8alpha, CD8beta, IL2R beta, IL2R gamma, IL7R alpha, ITGA4, VLA1, CD49a, ITGA4, IA4, CD49D, ITGA6, VLA-6, CD49f, ITGAD, CD11d, ITGAE, CD103, ITGAL, CD11a, LFA-1, ITGAM, CD11b, ITGAX, CD11c, ITGB1, CD29, ITGB2, CD18, LFA-1, ITGB7, NKG2D, NKG2C, TNFR2, TRANCE/RANKL, DNAM1 (CD226), SLAMF4 (CD244, 2B4), CD84, CD96 (Tactile), CEACAM1, CRTAM, Ly9 (CD229), CD160 (BY55), PSGL1, CD100 (SEMA4D), CD69, SLAMF6 (NTB-A, Ly108), SLAM (SLAMF1, CD150, IPO-3), BLAME (SLAMF8), SELPLG (CD162), LTBR, LAT, GADS, SLP-76, PAG/Cbp, CD19a, and a ligand that specifically binds with CD83.

[0591] The intracellular signaling sequences within the cytoplasmic portion of the CAR of the invention may be linked to each other in a random or specified order. Optionally, a short oligo- or polypeptide linker, for example, between 2 and 10 amino acids (e.g., 2, 3, 4, 5, 6, 7, 8, 9, or 10 amino acids) in length may form the linkage between intracellular signaling sequence. In one embodiment, a glycine-serine doublet can be used as a suitable linker. In one embodiment, a single amino acid, e.g., an alanine, a glycine, can be used as a suitable linker.

[0592] In one aspect, the intracellular signaling domain is designed to comprise two or more, e.g., 2, 3, 4, 5, or more, costimulatory signaling domains. In an embodiment, the two or more, e.g., 2, 3, 4, 5, or more, costimulatory signaling domains, are separated by a linker molecule, e.g., a linker molecule described herein. In one embodiment, the intracellular signaling domain comprises two costimulatory signaling domains. In some embodiments, the linker molecule is a glycine residue. In some embodiments, the linker is an alanine residue.

[0593] In one aspect, the intracellular signaling domain is designed to comprise the signaling domain of CD3-zeta and the signaling domain of CD28. In one aspect, the intracellular signaling domain is designed to comprise the signaling domain of CD3-zeta and the signaling domain of 4-1BB. In one aspect, the signaling domain of 4-1BB is a signaling domain of SEQ ID NO: 16. In one aspect, the signaling domain of CD3-zeta is a signaling domain of SEQ ID NO: 17.

[0594] In one aspect, the intracellular signaling domain is designed to comprise the signaling domain of CD3-zeta and the signaling domain of CD27. In one aspect, the signaling domain of CD27 comprises an amino acid sequence of

(SEQ ID NO: 51)

QRRKYRSNKGESPVEPAEPCRYSCPREEEGSTIPIQEDYRKPEPACSP.

In one aspect, the signalling domain of CD27 is encoded by a nucleic acid sequence of

(SEQ ID NO: 52)

AGGAGTAAGAGGAGCAGGCTCCTGCACAGTGACTACATGAACATGACTCC
CCGCCGCCCCGGGCCCACCCGCAAGCATTACCAGCCCTATGCCCCACCAC
GCGACTTCGCAGCCTATCGCTCC.

### Natural Killer Cell Receptor (NKR) CARs

[0595] In an embodiment, a CAR molecule described herein comprises one or more components of a natural killer cell receptor (NKR), thereby forming an NKR-CAR. The NKR component can be a transmembrane domain, a hinge domain, or a cytoplasmic domain from any of the following natural killer cell receptors: killer cell immunoglobulin-like receptor (KIR), e.g., KIR2DL1, KIR2DL2/L3, KIR2DL4, KIR2DL5A, KIR2DL5B, KIR2DS1, KIR2DS2, KIR2DS3, KIR2DS4, DIR2DS5, KIR3DL1/S1, KIR3DL2, KIR3DL3, KIR2DP1, and KIR3DP1; natural cytotoxicity receptor (NCR), e.g., NKp30, NKp44, NKp46; signaling lymphocyte activation molecule (SLAM) family of immune cell receptors, e.g., CD48, CD229, 2B4, CD84, NTB-A, CRACC, BLAME, and CD2F-10; Fc receptor (FcR), e.g., CD16, and CD64; and Ly49 receptors, e.g., LY49A, LY49C. The NKR-CAR molecules described herein may interact with an adaptor molecule or intracellular signaling domain, e.g., DAP12. Exemplary configurations and sequences of CAR molecules comprising NKR components are described in International Publication No. WO2014/145252, the contents of which are hereby incorporated by reference.

### Strategies for Regulating Chimeric Antigen Receptors

[0596] In some embodiments, a regulatable CAR (RCAR) where the CAR activity can be controlled is desirable to optimize the safety and efficacy of a CAR therapy. There are many ways CAR activities can be regulated. For example, inducing apoptosis using, e.g., a caspase fused to a dimerization domain (see, e.g., Di et al., N Engl. J. Med. 2011 Nov. 3; 365(18):1673-1683), can be used as a safety switch in the CAR therapy of the instant invention. In one embodiment, the cells (e.g., T cells or NK cells) expressing a CAR of the present invention further comprise an inducible apoptosis switch, wherein a human caspase (e.g., caspase 9) or a modified version is fused to a modification of the human FKB protein that allows conditional dimerization. In the presence of a small molecule, such as a rapalog (e.g., AP 1903, AP20187), the inducible caspase (e.g., caspase 9) is activated and leads to the rapid apoptosis and death of the cells (e.g., T cells or NK cells) expressing a CAR of the present invention. Examples of a caspase-based inducible apoptosis switch (or one or more aspects of such a switch) have been described in, e.g., US2004040047; US20110286980; US20140255360; WO1997031899; WO2014151960; WO2014164348; WO2014197638; WO2014197638; all of which are incorporated by reference herein.

[0597] In another example, CAR-expressing cells can also express an inducible Caspase-9 (iCaspase-9) molecule that, upon administration of a dimerizer drug (e.g., rimiducid (also called AP1903 (Bellicum Pharmaceuticals) or AP20187 (Ariad)) leads to activation of the Caspase-9 and apoptosis of the cells. The iCaspase-9 molecule contains a chemical inducer of dimerization (CID) binding domain that mediates dimerization in the presence of a CID. This results in inducible and selective depletion of CAR-expressing cells. In some cases, the iCaspase-9 molecule is encoded by a nucleic acid molecule separate from the CAR-encoding vector(s). In some cases, the iCaspase-9 molecule is encoded by the same nucleic acid molecule as the CAR-encoding vector. The iCaspase-9 can provide a safety switch to avoid any toxicity of CAR-expressing cells. See, e.g., Song et al. Cancer Gene Ther. 2008; 15(10):667-75; Clinical Trial Id. No. NCT02107963; and Di Stasi et al. N. Engl. J. Med. 2011; 365:1673-83.

[0598] Alternative strategies for regulating the CAR therapy of the instant invention include utilizing small molecules or antibodies that deactivate or turn off CAR activity, e.g., by deleting CAR-expressing cells, e.g., by inducing antibody dependent cell-mediated cytotoxicity (ADCC). For example, CAR-expressing cells described herein may also express an antigen that is recognized by molecules capable of inducing cell death, e.g., ADCC or complement-induced cell death. For example, CAR expressing cells described herein may also express a receptor capable of being targeted by an antibody or antibody fragment. Examples of such receptors include EpCAM, VEGFR, integrins (e.g., integrins αvβ3, α4, αI3/4β3, α4β7, α5β1, αvβ3, αv), members of the TNF receptor superfamily (e.g., TRAIL-R1, TRAIL-R2), PDGF Receptor, interferon receptor, folate receptor, GPNMB, ICAM-1, HLA-DR, CEA, CA-125, MUC1, TAG-72, IL-6 receptor, 5T4, GD2, GD3, CD2, CD3, CD4, CD5, CD11, CD11a/LFA-1, CD15, CD18/ITGB2, CD19, CD20, CD22, CD23/1gE Receptor, CD25, CD28, CD30, CD33, CD38, CD40, CD41, CD44, CD51, CD52, CD62L, CD74, CD80, CD125, CD147/basigin, CD152/CTLA-4, CD154/CD40L, CD195/CCR5, CD319/SLAMF7, and EGFR, and truncated versions thereof (e.g., versions preserving one or more extracellular epitopes but lacking one or more regions within the cytoplasmic domain).

[0599] For example, a CAR-expressing cell described herein may also express a truncated epidermal growth factor receptor (EGFR) which lacks signaling capacity but retains the epitope that is recognized by molecules capable of inducing ADCC, e.g., cetuximab (ERBITUX®), such that administration of cetuximab induces ADCC and subsequent depletion of the CAR-expressing cells (see, e.g., WO2011/056894, and Jonnalagadda et al., Gene Ther. 2013; 20(8)853-860). Another strategy includes expressing a highly compact marker/suicide gene that combines target epitopes from both CD32 and CD20 antigens in the CAR-expressing cells described herein, which binds rituximab, resulting in selective depletion of the CAR-expressing cells, e.g., by ADCC (see, e.g., Philip et al., Blood. 2014; 124(8)1277-1287). Other methods for depleting CAR-expressing cells described herein include administration of CAMPATH, a monoclonal anti-CD52 antibody that selectively binds and targets mature lymphocytes, e.g., CAR-expressing cells, for destruction, e.g., by inducing ADCC. In other embodiments, the CAR-expressing cell can be selectively targeted using a CAR ligand, e.g., an anti-idiotypic antibody. In some embodiments, the anti-idiotypic antibody can cause effector cell activity, e.g., ADCC or ADC activities, thereby reducing the number of CAR-expressing cells. In other embodiments, the CAR ligand, e.g., the anti-idiotypic antibody, can be coupled to an agent that induces cell killing, e.g., a toxin, thereby reducing the number of CAR-expressing cells. Alternatively, the CAR molecules themselves can be configured such that the activity can be regulated, e.g., turned on and off, as described below.

[0600] In other embodiments, a CAR-expressing cell described herein may also express a target protein recognized by the T cell depleting agent. In one embodiment, the target protein is CD20 and the T cell depleting agent is an anti-CD20 antibody, e.g., rituximab. In such embodiment, the T cell depleting agent is administered once it is desirable to reduce or eliminate the CAR-expressing cell, e.g., to mitigate the CAR induced toxicity. In other embodiments, the T cell depleting agent is an anti-CD52 antibody, e.g., alemtuzumab.

[0601] In an aspect, a RCAR comprises a set of polypeptides, typically two in the simplest embodiments, in which the components of a standard CAR described herein, e.g., an antigen binding domain and an intracellular signaling domain, are partitioned on separate polypeptides or members. In some embodiments, the set of polypeptides include a dimerization switch that, upon the presence of a dimerization molecule, can couple the polypeptides to one another, e.g., can couple an antigen binding domain to an intracellular signaling domain. In one embodiment, a CAR of the present invention utilizes a dimerization switch as those described in, e.g., WO2014127261, which is incorporated by reference herein. Additional description and exemplary configurations of such regulatable CARs are provided herein and in International Publication No. WO 2015/090229, hereby incorporated by reference in its entirety.

[0602] In some embodiments, an RCAR involves a switch domain, e.g., a FKBP switch domain, as set out SEQ ID NO: 122, or comprise a fragment of FKBP having the ability to bind with FRB, e.g., as set out in SEQ ID NO: 123. In some embodiments, the RCAR involves a switch domain comprising a FRB sequence, e.g., as set out in SEQ ID NO: 124, or a mutant FRB sequence, e.g., as set out in any of SEQ ID Nos. 125-130.

(SEQ ID NO: 122)

D V P D Y A S L G G P S S P K K K R K V S R G V Q
V E T I S P G D G R T F P K R G Q T C V V H Y T G
M L E D G K K F D S S R D R N K P F K F M L G K Q
E V I R G W E E G V A Q M S V G Q R A K L T I S P
D Y A Y G A T G H P G I I P P H A T L V F D V E L
L K L E T S Y

(SEQ ID NO: 123)

V Q V E T I S P G D G R T F P K R G Q T C V V H Y
T G M L E D G K K F D S S R D R N K P F K F M L G
K Q E V I R G W E E G V A Q M S V G Q R A K L T I
S P D Y A Y G A T G H P G I I P P H A T L V F D V
E L L K L E T S

(SEQ ID NO: 124)

[sequence omitted]

TABLE 1
Exemplary mutant FRB having increased affinity
for a dimerization molecule.

| | | SEQ |
|---|---|---|
| | | ID |
| FRB mutant | Amino Acid Sequence | NO: |
| E2032I mutant | ILWHEMWHEGLIEASRLYFGERNVKGMFEVLEPLHAMMERGP | 125 |
| | QTLKETSFNQAYGRDLMEAQEWCRKYMKSGNVKDLTQAWD | |
| | LYYHVFRRISKTS | |
| E2032L mutant | ILWHEMWHEGLLEASRLYFGERNVKGMFEVLEPLHAMMERG | 126 |
| | PQTLKETSFNQAYGRDLMEAQEWCRKYMKSGNVKDLTQAW | |
| | DLYYHVFRRISKTS | |
| T2098L mutant | ILWHEMWHEGLEEASRLYFGERNVKGMFEVLEPLHAMMERG | 127 |
| | PQTLKETSFNQAYGRDLMEAQEWCRKYMKSGNVKDLLQAW | |
| | DLYYHVFRRISKTS | |
| E2032, T2098 | ILWHEMWHEGLXEASRLYFGERNVKGMFEVLEPLHAMMERG | 128 |
| mutant | PQTLKETSFNQAYGRDLMEAQEWCRKYMKSGNVKDLXQAW | |
| | DLYYHVFRRISKTS | |
| E2032I, T2098L | ILWHEMWHEGLIEASRLYFGERNVKGMFEVLEPLHAMMERGP | 129 |
| mutant | QTLKETSFNQAYGRDLMEAQEWCRKYMKSGNVKDLLQAWD | |
| | LYYHVFRRISKTS | |
| E2032L, | ILWHEMWHEGLLEASRLYFGERNVKGMFEVLEPLHAMMERG | 130 |
| T2098L | PQTLKETSFNQAYGRDLMEAQEWCRKYMKSGNVKDLLQAW | |
| mutant | DLYYHVFRRISKTS | |

### Split CAR

[0603] In some embodiments, the CAR-expressing cell uses a split CAR. The split CAR approach is described in more detail in publications WO2014/055442 and WO2014/055657. Briefly, a split CAR system comprises a cell expressing a first CAR having a first antigen binding domain and a costimulatory domain (e.g., 41BB), and the cell also expresses a second CAR having a second antigen binding domain and an intracellular signaling domain (e.g., CD3 zeta). When the cell encounters the first antigen, the costimulatory domain is activated, and the cell proliferates. When the cell encounters the second antigen, the intracellular signaling domain is activated and cell-killing activity begins. Thus, the CAR-expressing cell is only fully activated in the presence of both antigens.

### RNA Transfection

[0604] Disclosed herein are methods for producing an in vitro transcribed RNA CAR. The present invention also includes (among other things) a CAR encoding RNA construct that can be directly transfected into a cell. A method for generating mRNA for use in transfection can involve in vitro transcription (IVT) of a template with specially designed primers, followed by polyA addition, to produce a construct containing 3′ and 5′ untranslated sequence (“UTR”), a 5′ cap and/or Internal Ribosome Entry Site (IRES), the nucleic acid to be expressed, and a polyA tail, typically 50-2000 bases in length (SEQ ID NO:118).

[0605] In one aspect the CAR is encoded by a messenger RNA (mRNA). In one aspect the mRNA encoding the CAR is introduced into an immune effector cell, e.g., a T cell or a NK cell, for production of a CAR-expressing cell, e.g., a CART cell or a CAR NK cell. In one embodiment, the in vitro transcribed RNA CAR can be introduced to a cell as a form of transient transfection.

[0606] Additional method of RNA transfection are described on pages 192-196 of International Application WO 2016/164731, filed Apr. 8, 2016, which is incorporated by reference in its entirety.

### Non-Viral Delivery Methods

[0607] In some aspects, non-viral methods can be used to deliver a nucleic acid encoding a CAR described herein into a cell or tissue or a subject. In some embodiments, the non-viral method includes the use of a transposon (also called a transposable element). In some embodiments, a transposon is a piece of DNA that can insert itself at a location in a genome, for example, a piece of DNA that is capable of self-replicating and inserting its copy into a genome, or a piece of DNA that can be spliced out of a longer nucleic acid and inserted into another place in a genome.

[0608] Additional and exemplary transposons and non-viral delivery methods are described on pages 196-198 of International Application WO 2016/164731, filed Apr. 8, 2016, which is incorporated by reference in its entirety.

### Nucleic Acid Constructs Encoding a CAR

[0609] The present invention also provides nucleic acid molecules encoding one or more CAR constructs described herein, e.g., CD19 CAR, CD20 CAR, or CD22 CAR. In one aspect, the nucleic acid molecule is provided as a messenger RNA transcript. In one aspect, the nucleic acid molecule is provided as a DNA construct.

[0610] Accordingly, in one aspect, the invention pertains to an isolated nucleic acid molecule encoding a chimeric antigen receptor (CAR), wherein the CAR comprises a binding domain (e.g., that binds CD19, CD20, or CD22) a transmembrane domain, and an intracellular signaling domain comprising a stimulatory domain, e.g., a costimulatory signaling domain and/or a primary signaling domain, e.g., zeta chain.

[0611] In one embodiment, the binding domain is an anti-CD19 binding domain described herein, e.g., an anti-CD19 binding domain which comprises a sequence selected from a group consisting of SEQ ID NO:1, SEQ ID NO:2, SEQ ID NO:3, SEQ ID NO:4, SEQ ID NO:5, SEQ ID NO:6, SEQ ID NO:7, SEQ ID NO:8, SEQ ID NO:9, SEQ ID NO:10, SEQ ID NO:11, SEQ ID NO:12 and SEQ ID NO:59, or a sequence with 95-99% identity thereof.

[0612] In one embodiment, the nucleic acid comprises CD22-encoding a nucleic acid set out in Table 6A on pages 364-403 of International Application WO 2016/164731, filed Apr. 8, 2016, which is incorporated by reference in its entirety, or a sequence with 95-99% identity thereof.

[0613] In one embodiment, the nucleic acid comprises CD20-encoding a nucleic acid set out in Table 11A on pages 422-446 of International Application WO 2016/164731, filed Apr. 8, 2016, which is incorporated by reference in its entirety, or a sequence with 95-99% identity thereof.

[0614] In one embodiment, the transmembrane domain is transmembrane domain of a protein selected from the group consisting of the alpha, beta or zeta chain of the T-cell receptor, CD28, CD3 epsilon, CD45, CD4, CD5, CD8, CD9, CD16, CD22, CD33, CD37, CD64, CD80, CD86, CD134, CD137 and CD154. In one embodiment, the transmembrane domain comprises a sequence of SEQ ID NO: 15, or a sequence with 95-99% identity thereof. In one embodiment, the anti-CD19 binding domain is connected to the transmembrane domain by a hinge region, e.g., a hinge described herein. In one embodiment, the hinge region comprises SEQ ID NO:14 or SEQ ID NO:45 or SEQ ID NO:47 or SEQ ID NO:49, or a sequence with 95-99% identity thereof. In one embodiment, the isolated nucleic acid molecule further comprises a sequence encoding a costimulatory domain. In one embodiment, the costimulatory domain is a functional signaling domain of a protein selected from the group consisting of OX40, CD27, CD28, CDS, ICAM-1, LFA-1 (CD11a/CD18), ICOS (CD278), and 4-1BB (CD137). In one embodiment, the costimulatory domain is a functional signaling domain of a protein selected from the group consisting of MHC class I molecule, TNF receptor proteins, Immunoglobulin-like proteins, cytokine receptors, integrins, signaling lymphocytic activation molecules (SLAM proteins), activating NK cell receptors, BTLA, a Toll ligand receptor, OX40, CD2, CD7, CD27, CD28, CD30, CD40, CDS, ICAM-1, LFA-1 (CD11a/CD18), 4-1BB (CD137), B7-H3, CDS, ICAM-1, ICOS (CD278), GITR, BAFFR, LIGHT, HVEM (LIGHTR), KIRDS2, SLAMF7, NKp80 (KLRF1), NKp44, NKp30, NKp46, CD19, CD4, CD8alpha, CD8beta, IL2R beta, IL2R gamma, IL7R alpha, ITGA4, VLA1, CD49a, ITGA4, IA4, CD49D, ITGA6, VLA-6, CD49f, ITGAD, CD11d, ITGAE, CD103, ITGAL, CD11a, LFA-1, ITGAM, CD11b, ITGAX, CD11c, ITGB1, CD29, ITGB2, CD18, LFA-1, ITGB7, NKG2D, NKG2C, TNFR2, TRANCE/RANKL, DNAM1 (CD226), SLAMF4 (CD244, 2B4), CD84, CD96 (Tactile), CEACAM1, CRTAM, Ly9 (CD229), CD160 (BY55), PSGL1, CD100 (SEMA4D), CD69, SLAMF6 (NTB-A, Ly108), SLAM (SLAMF1, CD150, IPO-3), BLAME (SLAMF8), SELPLG (CD162), LTBR, LAT, GADS, SLP-76, PAG/Cbp, CD19a, and a ligand that specifically binds with CD83. In one embodiment, the costimulatory domain comprises a sequence of SEQ ID NO:16, or a sequence with 95-99% identity thereof. In one embodiment, the intracellular signaling domain comprises a functional signaling domain of 4-1BB and a functional signaling domain of CD3 zeta. In one embodiment, the intracellular signaling domain comprises the sequence of SEQ ID NO: 16 or SEQ ID NO:51, or a sequence with 95-99% identity thereof, and the sequence of SEQ ID NO: 17 or SEQ ID NO:43, or a sequence with 95-99% identity thereof, wherein the sequences comprising the intracellular signaling domain are expressed in the same frame and as a single polypeptide chain.

[0615] In another aspect, the invention pertains to an isolated nucleic acid molecule encoding a CAR construct comprising a leader sequence of SEQ ID NO: 13, a scFv domain having a sequence selected from the group consisting of SEQ ID NO:1, SEQ ID NO:2, SEQ ID NO:3, SEQ ID NO:4, SEQ ID NO:5, SEQ ID NO:6, SEQ ID NO:7, SEQ ID NO:8, SEQ ID NO:9, SEQ ID NO:10, SEQ ID NO:11, SEQ ID NO:12, and SEQ ID NO:59, (or a sequence with 95-99% identity thereof), a hinge region of SEQ ID NO:14 or SEQ ID NO:45 or SEQ ID NO:47 or SEQ ID NO:49 (or a sequence with 95-99% identity thereof), a transmembrane domain having a sequence of SEQ ID NO: 15 (or a sequence with 95-99% identity thereof), a 4-1BB costimulatory domain having a sequence of SEQ ID NO:16 or a CD27 costimulatory domain having a sequence of SEQ ID NO:51 (or a sequence with 95-99% identity thereof), and a CD3 zeta stimulatory domain having a sequence of SEQ ID NO:17 or SEQ ID NO:43 (or a sequence with 95-99% identity thereof).

[0616] In another aspect, the invention pertains to an isolated polypeptide molecule encoded by the nucleic acid molecule. In one embodiment, the isolated polypeptide molecule comprises a sequence selected from the group consisting of SEQ ID NO:31, SEQ ID NO:32, SEQ ID NO:33, SEQ ID NO:34, SEQ ID NO:35, SEQ ID NO:36, SEQ ID NO:37, SEQ ID NO:38, SEQ ID NO:39, SEQ ID NO:40, SEQ ID NO:41, SEQ ID NO:42, SEQ ID NO:59 or a sequence with 95-99% identity thereof.

[0617] In another aspect, the invention pertains to a nucleic acid molecule encoding a chimeric antigen receptor (CAR) molecule that comprises an anti-CD19 binding domain, a transmembrane domain, and an intracellular signaling domain comprising a stimulatory domain, and wherein said anti-CD19 binding domain comprises a sequence selected from the group consisting of SEQ ID NO:1, SEQ ID NO:2, SEQ ID NO:3, SEQ ID NO:4, SEQ ID NO:5, SEQ ID NO:6, SEQ ID NO:7, SEQ ID NO:8, SEQ ID NO:9, SEQ ID NO:10, SEQ ID NO:11, SEQ ID NO:12 and SEQ ID NO:59, or a sequence with 95-99% identity thereof.

[0618] In one embodiment, the encoded CAR molecule (e.g., CD19 CAR, CD20 CAR, or CD22 CAR) further comprises a sequence encoding a costimulatory domain. In one embodiment, the costimulatory domain is a functional signaling domain of a protein selected from the group consisting of OX40, CD27, CD28, CDS, ICAM-1, LFA-1 (CD11a/CD18) and 4-1BB (CD137). In one embodiment, the costimulatory domain comprises a sequence of SEQ ID NO:16. In one embodiment, the transmembrane domain is a transmembrane domain of a protein selected from the group consisting of the alpha, beta or zeta chain of the T-cell receptor, CD28, CD3 epsilon, CD45, CD4, CD5, CD8, CD9, CD16, CD22, CD33, CD37, CD64, CD80, CD86, CD134, CD137 and CD154. In one embodiment, the transmembrane domain comprises a sequence of SEQ ID NO:15. In one embodiment, the intracellular signaling domain comprises a functional signaling domain of 4-1BB and a functional signaling domain of zeta. In one embodiment, the intracellular signaling domain comprises the sequence of SEQ ID NO: 16 and the sequence of SEQ ID NO: 17, wherein the sequences comprising the intracellular signaling domain are expressed in the same frame and as a single polypeptide chain. In one embodiment, the anti-CD19 binding domain is connected to the transmembrane domain by a hinge region. In one embodiment, the hinge region comprises SEQ ID NO:14. In one embodiment, the hinge region comprises SEQ ID NO:45 or SEQ ID NO:47 or SEQ ID NO:49.

[0619] In another aspect, the invention pertains to an encoded CAR molecule comprising a leader sequence of SEQ ID NO: 13, a scFv domain having a sequence selected from the group consisting of SEQ ID NO:1, SEQ ID NO:2, SEQ ID NO:3, SEQ ID NO:4, SEQ ID NO:5, SEQ ID NO:6, SEQ ID NO:7, SEQ ID NO:8, SEQ ID NO:9, SEQ ID NO:10, SEQ ID NO:11, SEQ ID NO:12, and SEQ ID NO:59, or a sequence with 95-99% identity thereof, a hinge region of SEQ ID NO:14 or SEQ ID NO:45 or SEQ ID NO:47 or SEQ ID NO:49, a transmembrane domain having a sequence of SEQ ID NO: 15, a 4-1BB costimulatory domain having a sequence of SEQ ID NO:16 or a CD27 costimulatory domain having a sequence of SEQ ID NO:51, and a CD3 zeta stimulatory domain having a sequence of SEQ ID NO:17 or SEQ ID NO:43. In one embodiment, the encoded CAR molecule comprises a sequence selected from a group consisting of SEQ ID NO:31, SEQ ID NO:32, SEQ ID NO:33, SEQ ID NO:34, SEQ ID NO:35, SEQ ID NO:36, SEQ ID NO:37, SEQ ID NO:38, SEQ ID NO:39, SEQ ID NO:40, SEQ ID NO:41, SEQ ID NO:42, and SEQ ID NO:59, or a sequence with 95-99% identity thereof.

[0620] The nucleic acid sequences coding for the desired molecules can be obtained using recombinant methods known in the art, such as, for example by screening libraries from cells expressing the gene, by deriving the gene from a vector known to include the same, or by isolating directly from cells and tissues containing the same, using standard techniques. Alternatively, the gene of interest can be produced synthetically, rather than cloned.

[0621] The present invention also provides vectors in which a DNA of the present invention is inserted. Vectors derived from retroviruses such as the lentivirus are suitable tools to achieve long-term gene transfer since they allow long-term, stable integration of a transgene and its propagation in daughter cells. Lentiviral vectors have the added advantage over vectors derived from onco-retroviruses such as murine leukemia viruses in that they can transduce non-proliferating cells, such as hepatocytes. They also have the added advantage of low immunogenicity. A retroviral vector may also be, e.g., a gammaretroviral vector. A gammaretroviral vector may include, e.g., a promoter, a packaging signal (w), a primer binding site (PBS), one or more (e.g., two) long terminal repeats (LTR), and a transgene of interest, e.g., a gene encoding a CAR. A gammaretroviral vector may lack viral structural gens such as gag, pol, and env. Exemplary gammaretroviral vectors include Murine Leukemia Virus (MLV), Spleen-Focus Forming Virus (SFFV), and Myeloproliferative Sarcoma Virus (MPSV), and vectors derived therefrom. Other gammaretroviral vectors are described, e.g., in Tobias Maetzig et al., “Gammaretroviral Vectors: Biology, Technology and Application” Viruses. 2011 June; 3(6): 677-713.

[0622] In another embodiment, the vector comprising the nucleic acid encoding the desired CAR of the invention is an adenoviral vector (A5/35). In another embodiment, the expression of nucleic acids encoding CARs can be accomplished using of transposons such as sleeping beauty, crispr, CAS9, and zinc finger nucleases. See below June et al. 2009 Nature Reviews Immunology 9.10: 704-716, is incorporated herein by reference.

[0623] A vector may also include, e.g., a signal sequence to facilitate secretion, a polyadenylation signal and transcription terminator (e.g., from Bovine Growth Hormone (BGH) gene), an element allowing episomal replication and replication in prokaryotes (e.g. SV40 origin and ColE1 or others known in the art) and/or elements to allow selection (e.g., ampicillin resistance gene and/or zeocin marker).

[0624] In brief summary, the expression of natural or synthetic nucleic acids encoding CARs is typically achieved by operably linking a nucleic acid encoding the CAR polypeptide or portions thereof to a promoter, and incorporating the construct into an expression vector. The vectors can be suitable for replication and integration eukaryotes. Typical cloning vectors contain transcription and translation terminators, initiation sequences, and promoters useful for regulation of the expression of the desired nucleic acid sequence.

[0625] In some aspects, the expression constructs of the present invention may also be used for nucleic acid immunization and gene therapy, using standard gene delivery protocols. Methods for gene delivery are known in the art. See, e.g., U.S. Pat. Nos. 5,399,346, 5,580,859, 5,589,466, incorporated by reference herein in their entireties. In another embodiment, the invention provides a gene therapy vector.

[0626] The nucleic acid can be cloned into a number of types of vectors. For example, the nucleic acid can be cloned into a vector including, but not limited to a plasmid, a phagemid, a phage derivative, an animal virus, and a cosmid. Vectors of particular interest include expression vectors, replication vectors, probe generation vectors, and sequencing vectors.

[0627] Further, the expression vector may be provided to a cell in the form of a viral vector. Viral vector technology is well known in the art and is described, for example, in Sambrook et al., 2012, MOLECULAR CLONING: A LABORATORY MANUAL, volumes 1-4, Cold Spring Harbor Press, NY), and in other virology and molecular biology manuals. Viruses, which are useful as vectors include, but are not limited to, retroviruses, adenoviruses, adeno-associated viruses, herpes viruses, and lentiviruses. In general, a suitable vector contains an origin of replication functional in at least one organism, a promoter sequence, convenient restriction endonuclease sites, and one or more selectable markers, (e.g., WO 01/96584; WO 01/29058; and U.S. Pat. No. 6,326,193).

[0628] A number of viral based systems have been developed for gene transfer into mammalian cells. For example, retroviruses provide a convenient platform for gene delivery systems. A selected gene can be inserted into a vector and packaged in retroviral particles using techniques known in the art. The recombinant virus can then be isolated and delivered to cells of the subject either in vivo or ex vivo. A number of retroviral systems are known in the art. In some embodiments, adenovirus vectors are used. A number of adenovirus vectors are known in the art. In one embodiment, lentivirus vectors are used.

[0629] Additional promoter elements, e.g., enhancers, regulate the frequency of transcriptional initiation. Typically, these are located in the region 30-110 bp upstream of the start site, although a number of promoters have been shown to contain functional elements downstream of the start site as well. The spacing between promoter elements frequently is flexible, so that promoter function is preserved when elements are inverted or moved relative to one another. In the thymidine kinase (tk) promoter, the spacing between promoter elements can be increased to 50 bp apart before activity begins to decline. Depending on the promoter, it appears that individual elements can function either cooperatively or independently to activate transcription. Exemplary promoters include the CMV IE gene, EF-1α, ubiquitin C, or phosphoglycerokinase (PGK) promoters. In an embodiment, the promoter is a PGK promoter, e.g., a truncated PGK promoter as described herein.

[0630] An example of a promoter that is capable of expressing a CAR transgene in a mammalian T cell is the EF1a promoter. The native EF1a promoter drives expression of the alpha subunit of the elongation factor-1 complex, which is responsible for the enzymatic delivery of aminoacyl tRNAs to the ribosome. The EF1a promoter has been extensively used in mammalian expression plasmids and has been shown to be effective in driving CAR expression from transgenes cloned into a lentiviral vector. See, e.g., Milone et al., Mol. Ther. 17(8): 1453-1464 (2009). In one aspect, the EF1a promoter comprises the sequence provided as SEQ ID NO:100.

[0631] Another example of a promoter is the immediate early cytomegalovirus (CMV) promoter sequence. This promoter sequence is a strong constitutive promoter sequence capable of driving high levels of expression of any polynucleotide sequence operatively linked thereto. However, other constitutive promoter sequences may also be used, including, but not limited to the simian virus 40 (SV40) early promoter, mouse mammary tumor virus (MMTV), human immunodeficiency virus (HIV) long terminal repeat (LTR) promoter, MoMuLV promoter, an avian leukemia virus promoter, an Epstein-Barr virus immediate early promoter, a Rous sarcoma virus promoter, as well as human gene promoters such as, but not limited to, the actin promoter, the myosin promoter, the elongation factor-1□ promoter, the hemoglobin promoter, and the creatine kinase promoter. Further, the invention should not be limited to the use of constitutive promoters. Inducible promoters are also contemplated as part of the invention. The use of an inducible promoter provides a molecular switch capable of turning on expression of the polynucleotide sequence which it is operatively linked when such expression is desired, or turning off the expression when expression is not desired. Examples of inducible promoters include, but are not limited to a metallothionine promoter, a glucocorticoid promoter, a progesterone promoter, and a tetracycline promoter.

[0632] Another example of a promoter is the phosphoglycerate kinase (PGK) promoter. In embodiments, a truncated PGK promoter (e.g., a PGK promoter with one or more, e.g., 1, 2, 5, 10, 100, 200, 300, or 400, nucleotide deletions when compared to the wild-type PGK promoter sequence) may be desired. The nucleotide sequences of exemplary PGK promoters are provided below.

WT PGK Promoter:

(SEQ ID NO: 1323)

ACCCCTCTCTCCAGCCACTAAGCCAGTTGCTCCCTCGGCTGACGGCTGCA
CGCGAGGCCTCCGAACGTCTTACGCCTTGTGGCGCGCCCGTCCTTGTCCC
GGGTGTGATGGCGGGGTGTGGGGCGGAGGGCGTGGCGGGGAAGGGCCGGC
GACGAGAGCCGCGCGGGACGACTCGTCGGCGATAACCGGTGTCGGGTAGC
GCCAGCCGCGCGACGGTAACGAGGGACCGCGACAGGCAGACGCTCCCATG
ATCACTCTGCACGCCGAAGGCAAATAGTGCAGGCCGTGCGGCGCTTGGCG
TTCCTTGGAAGGGCTGAATCCCCGCCTCGTCCTTCGCAGCGGCCCCCCGG
GTGTTCCCATCGCCGCTTCTAGGCCCACTGCGACGCTTGCCTGCACTTCT
TACACGCTCTGGGTCCCAGCCGCGGCGACGCAAAGGGCCTTGGTGCGGGT
CTCGTCGGCGCAGGGACGCGTTTGGGTCCCGACGGAACCTTTTCCGCGTT
GGGGTTGGGGCACCATAAGCT

[0633] Exemplary truncated PGK Promoters:

PGK100:

(SEQ ID NO: 1324)

ACCCCTCTCTCCAGCCACTAAGCCAGTTGCTCCCTCGGCTGACGGCTGCA
CGCGAGGCCTCCGAACGTCTTACGCCTTGTGGCGCGCCCGTCCTTGTCCC
GGGTGTGATGGCGGGGTG
PGK200:

(SEQ ID NO: 1325)

ACCCCTCTCTCCAGCCACTAAGCCAGTTGCTCCCTCGGCTGACGGCTGCA
CGCGAGGCCTCCGAACGTCTTACGCCTTGTGGCGCGCCCGTCCTTGTCCC
GGGTGTGATGGCGGGGTGTGGGGCGGAGGGCGTGGCGGGGAAGGGCCGGC
GACGAGAGCCGCGCGGGACGACTCGTCGGCGATAACCGGTGTCGGGTAGC
GCCAGCCGCGCGACGGTAACG
PGK300:

(SEQ ID NO: 1326)

ACCCCTCTCTCCAGCCACTAAGCCAGTTGCTCCCTCGGCTGACGGCTGCA
CGCGAGGCCTCCGAACGTCTTACGCCTTGTGGCGCGCCCGTCCTTGTCCC
GGGTGTGATGGCGGGGTGTGGGGCGGAGGGCGTGGCGGGGAAGGGCCGGC
GACGAGAGCCGCGCGGGACGACTCGTCGGCGATAACCGGTGTCGGGTAGC
GCCAGCCGCGCGACGGTAACGAGGGACCGCGACAGGCAGACGCTCCCATG
ATCACTCTGCACGCCGAAGGCAAATAGTGCAGGCCGTGCGGCGCTTGGCG
TTCCTTGGAAGGGCTGAATCCCCG
PGK400:

(SEQ ID NO: 1327)

ACCCCTCTCTCCAGCCACTAAGCCAGTTGCTCCCTCGGCTGACGGCTGCA
CGCGAGGCCTCCGAACGTCTTACGCCTTGTGGCGCGCCCGTCCTTGTCCC
GGGTGTGATGGCGGGGTGTGGGGCGGAGGGCGTGGCGGGGAAGGGCCGGC
GACGAGAGCCGCGCGGGACGACTCGTCGGCGATAACCGGTGTCGGGTAGC
GCCAGCCGCGCGACGGTAACGAGGGACCGCGACAGGCAGACGCTCCCATG
ATCACTCTGCACGCCGAAGGCAAATAGTGCAGGCCGTGCGGCGCTTGGCG
TTCCTTGGAAGGGCTGAATCCCCGCCTCGTCCTTCGCAGCGGCCCCCCGG
GTGTTCCCATCGCCGCTTCTAGGCCCACTGCGACGCTTGCCTGCACTTCT
TACACGCTCTGGGTCCCAGCCG

[0634] A vector may also include, e.g., a signal sequence to facilitate secretion, a polyadenylation signal and transcription terminator (e.g., from Bovine Growth Hormone (BGH) gene), an element allowing episomal replication and replication in prokaryotes (e.g. SV40 origin and ColE1 or others known in the art) and/or elements to allow selection (e.g., ampicillin resistance gene and/or zeocin marker).

[0635] In order to assess the expression of a CAR polypeptide or portions thereof, the expression vector to be introduced into a cell can also contain either a selectable marker gene or a reporter gene or both to facilitate identification and selection of expressing cells from the population of cells sought to be transfected or infected through viral vectors. In other aspects, the selectable marker may be carried on a separate piece of DNA and used in a co-transfection procedure. Both selectable markers and reporter genes may be flanked with appropriate regulatory sequences to enable expression in the host cells. Useful selectable markers include, for example, antibiotic-resistance genes, such as neo and the like.

[0636] Reporter genes are used for identifying potentially transfected cells and for evaluating the functionality of regulatory sequences. In general, a reporter gene is a gene that is not present in or expressed by the recipient organism or tissue and that encodes a polypeptide whose expression is manifested by some easily detectable property, e.g., enzymatic activity. Expression of the reporter gene is assayed at a suitable time after the DNA has been introduced into the recipient cells. Suitable reporter genes may include genes encoding luciferase, beta-galactosidase, chloramphenicol acetyl transferase, secreted alkaline phosphatase, or the green fluorescent protein gene (e.g., Ui-Tei et al., 2000 FEBS Letters 479: 79-82). Suitable expression systems are well known and may be prepared using known techniques or obtained commercially. In general, the construct with the minimal 5′ flanking region showing the highest level of expression of reporter gene is identified as the promoter. Such promoter regions may be linked to a reporter gene and used to evaluate agents for the ability to modulate promoter-driven transcription.

[0637] In embodiments, the vector may comprise two or more nucleic acid sequences encoding a CAR, e.g., a first CAR that binds to CD19 and a second CAR, e.g., an inhibitory CAR or a CAR that specifically binds to a second antigen, e.g., CD10, CD20, CD22, CD34, CD123, FLT-3, ROR1, CD79b, CD179b, or CD79a. In such embodiments, the two or more nucleic acid sequences encoding the CAR are encoded by a single nucleic molecule in the same frame and as a single polypeptide chain. In this aspect, the two or more CARs, can, e.g., be separated by one or more peptide cleavage sites. (e.g., an auto-cleavage site or a substrate for an intracellular protease). Examples of peptide cleavage sites include the following, wherein the GSG residues are optional:

T2A:

(SEQ ID NO: 1328)

(GSG)EGRGSLLTCGDVEENPGP
P2A:

(SEQ ID NO: 1329)

(GSG)ATNFSLLKQAGDVEENPGP
E2A:

(SEQ ID NO: 1330)

(GSG)QCTNYALLKLAGDVESNPGP
F2A:

(SEQ ID NO: 1331)

(GSG)VKQTLNFDLLKLAGDVESNPGP

[0638] Methods of introducing and expressing genes into a cell are known in the art. In the context of an expression vector, the vector can be readily introduced into a host cell, e.g., mammalian, bacterial, yeast, or insect cell by any method in the art. For example, the expression vector can be transferred into a host cell by physical, chemical, or biological means.

[0639] Physical methods for introducing a polynucleotide into a host cell include calcium phosphate precipitation, lipofection, particle bombardment, microinjection, electroporation, and the like. Methods for producing cells comprising vectors and/or exogenous nucleic acids are well-known in the art. See, for example, Sambrook et al., 2012, MOLECULAR CLONING: A LABORATORY MANUAL, volumes 1-4, Cold Spring Harbor Press, NY). A suitable method for the introduction of a polynucleotide into a host cell is calcium phosphate transfection.

[0640] Biological methods for introducing a polynucleotide of interest into a host cell include the use of DNA and RNA vectors. Viral vectors, and especially retroviral vectors, have become the most widely used method for inserting genes into mammalian, e.g., human cells. Other viral vectors can be derived from lentivirus, poxviruses, herpes simplex virus I, adenoviruses and adeno-associated viruses, and the like. See, for example, U.S. Pat. Nos. 5,350,674 and 5,585,362.

[0641] Chemical means for introducing a polynucleotide into a host cell include colloidal dispersion systems, such as macromolecule complexes, nanocapsules, microspheres, beads, and lipid-based systems including oil-in-water emulsions, micelles, mixed micelles, and liposomes. An exemplary colloidal system for use as a delivery vehicle in vitro and in vivo is a liposome (e.g., an artificial membrane vesicle). Other methods of state-of-the-art targeted delivery of nucleic acids are available, such as delivery of polynucleotides with targeted nanoparticles or other suitable sub-micron sized delivery system.

[0642] In the case where a non-viral delivery system is utilized, an exemplary delivery vehicle is a liposome. The use of lipid formulations is contemplated for the introduction of the nucleic acids into a host cell (in vitro, ex vivo or in vivo). In another aspect, the nucleic acid may be associated with a lipid. The nucleic acid associated with a lipid may be encapsulated in the aqueous interior of a liposome, interspersed within the lipid bilayer of a liposome, attached to a liposome via a linking molecule that is associated with both the liposome and the oligonucleotide, entrapped in a liposome, complexed with a liposome, dispersed in a solution containing a lipid, mixed with a lipid, combined with a lipid, contained as a suspension in a lipid, contained or complexed with a micelle, or otherwise associated with a lipid. Lipid, lipid/DNA or lipid/expression vector associated compositions are not limited to any particular structure in solution. For example, they may be present in a bilayer structure, as micelles, or with a “collapsed” structure. They may also simply be interspersed in a solution, possibly forming aggregates that are not uniform in size or shape. Lipids are fatty substances which may be naturally occurring or synthetic lipids. For example, lipids include the fatty droplets that naturally occur in the cytoplasm as well as the class of compounds which contain long-chain aliphatic hydrocarbons and their derivatives, such as fatty acids, alcohols, amines, amino alcohols, and aldehydes.

[0643] Lipids suitable for use can be obtained from commercial sources. For example, dimyristyl phosphatidylcholine (“DMPC”) can be obtained from Sigma, St. Louis, Mo.; dicetyl phosphate (“DCP”) can be obtained from K & K Laboratories (Plainview, N.Y.); cholesterol (“Choi”) can be obtained from Calbiochem-Behring; dimyristyl phosphatidylglycerol (“DMPG”) and other lipids may be obtained from Avanti Polar Lipids, Inc. (Birmingham, Ala.). Stock solutions of lipids in chloroform or chloroform/methanol can be stored at about −20° C. Chloroform is used as the only solvent since it is more readily evaporated than methanol. “Liposome” is a generic term encompassing a variety of single and multilamellar lipid vehicles formed by the generation of enclosed lipid bilayers or aggregates. Liposomes can be characterized as having vesicular structures with a phospholipid bilayer membrane and an inner aqueous medium. Multilamellar liposomes have multiple lipid layers separated by aqueous medium. They form spontaneously when phospholipids are suspended in an excess of aqueous solution. The lipid components undergo self-rearrangement before the formation of closed structures and entrap water and dissolved solutes between the lipid bilayers (Ghosh et al., 1991 Glycobiology 5: 505-10). However, compositions that have different structures in solution than the normal vesicular structure are also encompassed. For example, the lipids may assume a micellar structure or merely exist as nonuniform aggregates of lipid molecules. Also contemplated are lipofectamine-nucleic acid complexes.

[0644] Regardless of the method used to introduce exogenous nucleic acids into a host cell or otherwise expose a cell to the inhibitor of the present invention, in order to confirm the presence of the recombinant DNA sequence in the host cell, a variety of assays may be performed. Such assays include, for example, “molecular biological” assays well known to those of skill in the art, such as Southern and Northern blotting, RT-PCR and PCR; “biochemical” assays, such as detecting the presence or absence of a particular peptide, e.g., by immunological means (ELISAs and Western blots) or by assays described herein to identify agents falling within the scope of the invention.

[0645] The present invention further provides a vector comprising a CAR encoding nucleic acid molecule. In one aspect, a CAR vector can be directly transduced into a cell, e.g., a T cell. In one aspect, the vector is a cloning or expression vector, e.g., a vector including, but not limited to, one or more plasmids (e.g., expression plasmids, cloning vectors, minicircles, minivectors, double minute chromosomes), retroviral and lentiviral vector constructs. In one aspect, the vector is capable of expressing the CAR construct in mammalian T cells. In one aspect, the mammalian T cell is a human T cell.

### Immune Effector Cells Expressing a CAR

[0646] In another aspect, the present invention provides a population of CAR-expressing cells. In some embodiments, the population of CAR-expressing cells comprises a cell that expresses one or more CARs described herein. In some embodiments, the population of CAR-expressing cells comprises a mixture of cells expressing different CARs.

[0647] For example, in one embodiment, the population of CART cells can include a first cell expressing a CAR having an antigen binding domain to a tumor antigen described herein, e.g., CD19, and a second cell expressing a CAR having a different antigen binding domain, e.g., an antigen binding domain to a different tumor antigen described herein, e.g., an antigen binding domain to a tumor antigen described herein that differs from the tumor antigen bound by the antigen binding domain of the CAR expressed by the first cell, e.g., CD10, CD20, CD22, CD34, CD123, FLT-3, ROR1, CD79b, CD179b, or CD79a.

[0648] As another example, the population of CAR-expressing cells can include a first cell expressing a CAR that includes an antigen binding domain to a tumor antigen described herein, and a second cell expressing a CAR that includes an antigen binding domain to a target other than a tumor antigen as described herein. In one embodiment, the population of CAR-expressing cells includes, e.g., a first cell expressing a CAR that includes a primary intracellular signaling domain, and a second cell expressing a CAR that includes a secondary signaling domain. Either one or both of the CAR expressing cells can have a truncated PGK promoter, e.g., as described herein, operably linked to the nucleic acid encoding the CAR.

[0649] In another aspect, the present invention provides a population of cells wherein at least one cell in the population expresses a CAR having an antigen binding domain to a tumor antigen described herein, and a second cell expressing another agent, e.g., an agent which enhances the activity of a CAR-expressing cell. The CAR expressing cells of the population can have a truncated PGK promoter, e.g., as described herein, operably linked to the nucleic acid encoding the CAR. In one embodiment, the agent can be an agent which inhibits an inhibitory molecule. Inhibitory molecules, e.g., PD-1, can, in some embodiments, decrease the ability of a CAR-expressing cell to mount an immune effector response. Examples of inhibitory molecules include PD-1, PD-L1, PD-L2, CTLA4, TIM3, CEACAM (CEACAM-1, CEACAM-3, and/or CEACAM-5), LAG3, VISTA, BTLA, TIGIT, LAIR1, CD160, 2B4, CD80, CD86, B7-H3 (CD276), B7-H4 (VTCN1), HVEM (TNFRSF14 or CD270), KIR, A2aR, MHC class I, MHC class II, GALS, adenosine, and TGF (e.g., TGF beta). In one embodiment, the agent which inhibits an inhibitory molecule comprises a first polypeptide, e.g., an inhibitory molecule, associated with a second polypeptide that provides a positive signal to the cell, e.g., an intracellular signaling domain described herein. In one embodiment, the agent comprises a first polypeptide, e.g., of an inhibitory molecule such as PD1, PD-L1, CTLA4, TIM3, CEACAM (e.g., CEACAM-1, CEACAM-3, and/or CEACAM-5), LAG3, VISTA, BTLA, TIGIT, LAIR1, CD160, 2B4 or TGF beta, or a fragment of any of these, and a second polypeptide which is an intracellular signaling domain described herein (e.g., comprising a costimulatory domain (e.g., 41BB, CD27, OX40 or CD28, e.g., as described herein) and/or a primary signaling domain (e.g., a CD3 zeta signaling domain described herein). In one embodiment, the agent comprises a first polypeptide of PD-1 or a fragment thereof, and a second polypeptide of an intracellular signaling domain described herein (e.g., a CD28 signaling domain described herein and/or a CD3 zeta signaling domain described herein).

Co-Expression of CAR with Other Molecules or Agents

[0650] Co-Expression of a Second CAR

[0651] In one aspect, the CAR-expressing cell described herein can further comprise a second CAR, e.g., a second CAR that includes a different antigen binding domain, e.g., to the same target (CD19) or a different target (e.g., CD10, CD20, CD22, CD34, CD123, FLT-3, ROR1, CD79b, CD179b, or CD79a). In one embodiment, the second CAR includes an antigen binding domain to a target expressed on acute myeloid leukemia cells, such as, e.g., CD20, CD22, ROR1, CD10, CD33, CLL-1, CD34, CD123, FLT3, CD79b, CD179b, and CD79a. In one embodiment, the CAR-expressing cell comprises a first CAR that targets a first antigen and includes an intracellular signaling domain having a costimulatory signaling domain but not a primary signaling domain, and a second CAR that targets a second, different, antigen and includes an intracellular signaling domain having a primary signaling domain but not a costimulatory signaling domain. While not wishing to be bound by theory, placement of a costimulatory signaling domain, e.g., 4-1BB, CD28, CD27 or OX-40, onto the first CAR, and the primary signaling domain, e.g., CD3 zeta, on the second CAR can limit the CAR activity to cells where both targets are expressed. In one embodiment, the CAR expressing cell comprises a first CD19 CAR that includes a CD19 binding domain, a transmembrane domain and a costimulatory domain and a second CAR that targets an antigen other than CD19 (e.g., an antigen expressed on AML cells, e.g., CD22, CD20, ROR1, CD10, CD33, CLL-1, CD34, CD123, FLT3, CD79b, CD179b, or CD79a) and includes an antigen binding domain, a transmembrane domain and a primary signaling domain. In another embodiment, the CAR expressing cell comprises a first CD19 CAR that includes a CD19 binding domain, a transmembrane domain and a primary signaling domain and a second CAR that targets an antigen other than CD19 (e.g., an antigen expressed on AML cells, e.g., CD22, CD20, ROR1, CD10, CD33, CD123, CLL-1, CD34, FLT3, CD79b, CD179b, or CD79a) and includes an antigen binding domain to the antigen, a transmembrane domain and a costimulatory signaling domain.

[0652] In one aspect, the CAR-expressing cell described herein can further comprise a second CAR, e.g., a second CAR that includes a different antigen binding domain, e.g., to the same target (e.g., CD19) or a different target (e.g., a target other than CD19, e.g., CD10, CD20, CD22, CD34, CD123, FLT-3, ROR1, CD79b, CD179b, or CD79a). In one embodiment, the CAR-expressing cell comprises a first CAR that targets a first antigen and includes an intracellular signaling domain having a costimulatory signaling domain but not a primary signaling domain, and a second CAR that targets a second, different, antigen and includes an intracellular signaling domain having a primary signaling domain but not a costimulatory signaling domain. Placement of a costimulatory signaling domain, e.g., 4-1BB, CD28, CD27, OX-40 or ICOS, onto the first CAR, and the primary signaling domain, e.g., CD3 zeta, on the second CAR can limit the CAR activity to cells where both targets are expressed. In one embodiment, the CAR expressing cell comprises a first CAR that includes an antigen binding domain, a transmembrane domain and a costimulatory domain and a second CAR that targets another antigen and includes an antigen binding domain, a transmembrane domain and a primary signaling domain. In another embodiment, the CAR expressing cell comprises a first CAR that includes an antigen binding domain, a transmembrane domain and a primary signaling domain and a second CAR that targets another antigen and includes an antigen binding domain to the antigen, a transmembrane domain and a costimulatory signaling domain.

[0653] In one embodiment, the CAR-expressing cell comprises an XCAR described herein (e.g., CD19 CAR, CD20 CAR, or CD22 CAR) and an inhibitory CAR. In one embodiment, the CAR-expressing cell comprises a CD19 CAR described herein and an inhibitory CAR. In one embodiment, the inhibitory CAR comprises an antigen binding domain that binds an antigen found on normal cells but not cancer cells, e.g., normal cells that also express CD19. In one embodiment, the inhibitory CAR comprises the antigen binding domain, a transmembrane domain and an intracellular domain of an inhibitory molecule. For example, the intracellular domain of the inhibitory CAR can be an intracellular domain PD-1, PD-L1, PD-L2, CTLA4, TIM3, CEACAM (CEACAM-1, CEACAM-3, and/or CEACAM-5), LAGS, VISTA, BTLA, TIGIT, LAIR1, CD160, 2B4, CD80, CD86, B7-H3 (CD276), B7-H4 (VTCN1), HVEM (TNFRSF14 or CD270), KIR, A2aR, MHC class I, MHC class II, GAL9, adenosine, and TGF (e.g., TGF beta).

[0654] In one embodiment, when the CAR-expressing cell comprises two or more different CARs, the antigen binding domains of the different CARs can be such that the antigen binding domains do not interact with one another. For example, a cell expressing a first and second CAR can have an antigen binding domain of the first CAR, e.g., as a fragment, e.g., an scFv, that does not form an association with the antigen binding domain of the second CAR, e.g., the antigen binding domain of the second CAR is a VHH.

Co-Expression of an Agent that Enhances CAR Activity

[0655] In another aspect, the CAR-expressing cell described herein can further express another agent, e.g., an agent that enhances the activity or fitness of a CAR-expressing cell.

[0656] For example, in one embodiment, the agent can be an agent which inhibits a molecule that modulates or regulates, e.g., inhibits, T cell function. In some embodiments, the molecule that modulates or regulates T cell function is an inhibitory molecule. Inhibitory molecules, e.g., PD1, can, in some embodiments, decrease the ability of a CAR-expressing cell to mount an immune effector response. Examples of inhibitory molecules include PD1, PD-L1, PD-L2, CTLA4, TIM3, CEACAM (e.g., CEACAM-1, CEACAM-3 and/or CEACAM-5), LAGS, VISTA, BTLA, TIGIT, LAIR1, CD160, 2B4, CD160, 2B4, CD80, CD86, B7-H3 (CD276), B7-H4 (VTCN1), HVEM (TNFRSF14 or CD270), KIR, A2aR, MHC class I, MHC class II, GAL9, adenosine, and TGF (e.g., TGF beta).

[0657] In one embodiment, an inhibitory nucleic acid, e.g., an inhibitory nucleic acid, e.g., a dsRNA, e.g., an siRNA or shRNA, a clustered regularly interspaced short palindromic repeats (CRISPR), a transcription-activator like effector nuclease (TALEN), or a zinc finger endonuclease (ZFN), e.g., as described herein, can be used to inhibit expression of a molecule that modulates or regulates, e.g., inhibits, T-cell function in the CAR-expressing cell. In an embodiment the agent is an shRNA, e.g., an shRNA described herein. In an embodiment, the agent that modulates or regulates, e.g., inhibits, T-cell function is inhibited within a CAR-expressing cell. For example, a dsRNA molecule that inhibits expression of a molecule that modulates or regulates, e.g., inhibits, T-cell function is linked to the nucleic acid that encodes a component, e.g., all of the components, of the CAR.

[0658] In one embodiment, the agent which inhibits an inhibitory molecule comprises a first polypeptide, e.g., an inhibitory molecule, associated with a second polypeptide that provides a positive signal to the cell, e.g., an intracellular signaling domain described herein. In one embodiment, the agent comprises a first polypeptide, e.g., of an inhibitory molecule such as PD1, PD-L1, PD-L2, CTLA4, TIM3, CEACAM (e.g., CEACAM-1, CEACAM-3 and/or CEACAM-5), LAGS, VISTA, BTLA, TIGIT, LAIR1, CD160, 2B4, CD160, 2B4, CD80, CD86, B7-H3 (CD276), B7-H4 (VTCN1), HVEM (TNFRSF14 or CD270), KIR, A2aR, MHC class I, MHC class II, GALS, adenosine, or TGF (e.g., TGF beta), or a fragment of any of these (e.g., at least a portion of an extracellular domain of any of these), and a second polypeptide which is an intracellular signaling domain described herein (e.g., comprising a costimulatory domain (e.g., 41BB, CD27 or CD28, e.g., as described herein) and/or a primary signaling domain (e.g., a CD3 zeta signaling domain described herein). In one embodiment, the agent comprises a first polypeptide of PD1 or a fragment thereof (e.g., at least a portion of an extracellular domain of PD1), and a second polypeptide of an intracellular signaling domain described herein (e.g., a CD28 signaling domain described herein and/or a CD3 zeta signaling domain described herein). PD1 is an inhibitory member of the CD28 family of receptors that also includes CD28, CTLA-4, ICOS, and BTLA. PD-1 is expressed on activated B cells, T cells and myeloid cells (Agata et al. 1996 Int. Immunol 8:765-75). Two ligands for PD1, PD-L1 and PD-L2 have been shown to downregulate T cell activation upon binding to PD1 (Freeman et a. 2000 J Exp Med 192:1027-34; Latchman et al. 2001 Nat Immunol 2:261-8; Carter et al. 2002 Eur J Immunol 32:634-43). PD-L1 is abundant in human cancers (Dong et al. 2003 J Mol Med 81:281-7; Blank et al. 2005 Cancer Immunol. Immunother 54:307-314; Konishi et al. 2004 Clin Cancer Res 10:5094). Immune suppression can be reversed by inhibiting the local interaction of PD1 with PD-L1.

[0659] In one embodiment, the agent comprises the extracellular domain (ECD) of an inhibitory molecule, e.g., Programmed Death 1 (PD1), can be fused to a transmembrane domain and intracellular signaling domains such as 41BB and CD3 zeta (also referred to herein as a PD1 CAR). In one embodiment, the PD1 CAR, when used in combinations with a CD19 CAR described herein, improves the persistence of the T cell. In one embodiment, the CAR is a PD1 CAR comprising the extracellular domain of PD1 indicated as underlined in SEQ ID NO: 121. In one embodiment, the PD1 CAR comprises the amino acid sequence of SEQ ID NO:121.

(SEQ ID NO: 121)

Malpvtalllplalllhaarppgwfldspdrpwnpptfspallvvtegdn
atftcsfsntsesfvlnwyrmspsnqtdklaafpedrsqpgqdcrfrvtq
lpngrdfhmsvvrarrndsgtylcgaislapkaqikeslraelrvterra
evptahpspsprpagqfqtlvtttpaprpptpaptiasqplslrpeacrp
aaggavhtrgldfacdiyiwaplagtcgvlllslvitlyckrgrkkllyi
fkqpfmrpvqttqeedgcscrfpeeeeggcelrvkfsrsadapaykqgqn
qlynelnlgrreeydvldkrrgrdpemggkprrknpqeglynelqkdkma
eayseigmkgerrrgkghdglyqglstatkdtydalhmqalppr.

[0660] In one embodiment, the PD1 CAR comprises the amino acid sequence provided below (SEQ ID NO:119).

(SEQ ID NO: 119)

pgwfldspdrpwnpptfspallvvtegdnatftcsfsntsesfvlnwyrm
spsnqtdklaafpedrsqpgqdcrfrvtqlpngrdfhmsvvrarrndsgt
ylcgaislapkaqikeslraelrvterraevptahpspsprpagqfqtlv
tttpaprpptpaptiasqplslrpeacrpaaggavhtrgldfacdiyiwa
plagtcgvlllslvitlyckrgrkkllyifkqpfmrpvqttqeedgcscr
fpeeeeggcelrvkfsrsadapaykqgqnqlynelnlgrreeydvldkrr
grdpemggkprrknpqeglynelqkdkmaeayseigmkgerrrgkghdgl
yqglstatkdtydalhmqalppr.

[0661] Tin one embodiment, the agent comprises a nucleic acid sequence encoding the PD1 CAR, e.g., the PD1 CAR described herein. In one embodiment, the nucleic acid sequence for the PD1 CAR is shown below, with the PD1 ECD underlined below in SEQ ID NO: 120

(SEQ ID NO: 120)

atggccctccctgtcactgccctgcttctccccctcgcactcctgctcca
cgccgctagaccacccggatggtttctggactctccggatcgcccgtgga
atcccccaaccttctcaccggcactcttggttgtgactgagggcgataat
gcgaccttcacgtgctcgttctccaacacctccgaatcattcgtgctgaa
ctggtaccgcatgagcccgtcaaaccagaccgacaagctcgccgcgtttc
cggaagatcggtcgcaaccgggacaggattgtcggttccgcgtgactcaa
ctgccgaatggcagagacttccacatgagcgtggtccgcgctaggcgaaa
cgactccgggacctacctgtgcggagccatctcgctggcgcctaaggccc
aaatcaaagagagcttgagggccgaactgagagtgaccgagcgcagagct
gaggtgccaactgcacatccatccccatcgcctcggcctgcggggcagtt
tcagaccctggtcacgaccactccggcgccgcgcccaccgactccggccc
caactatcgcgagccagcccctgtcgctgaggccggaagcatgccgccct
gccgccggaggtgctgtgcatacccggggattggacttcgcatgcgacat
ctacatttgggctcctctcgccggaacttgtggcgtgctccttctgtccc
tggtcatcaccctgtactgcaagcggggtcggaaaaagcttctgtacatt
ttcaagcagcccttcatgaggcccgtgcaaaccacccaggaggaggacgg
ttgctcctgccggttccccgaagaggaagaaggaggttgcgagctgcgcg
tgaagttctcccggagcgccgacgcccccgcctataagcagggccagaac
cagctgtacaacgaactgaacctgggacggcgggaagagtacgatgtgct
ggacaagcggcgcggccgggaccccgaaatgggcgggaagcctagaagaa
agaaccctcaggaaggcctgtataacgagctgcagaaggacaagatggcc
gaggcctactccgaaattgggatgaagggagagcggcggaggggaaaggg
gcacgacggcctgtaccaaggactgtccaccgccaccaaggacacatacg
atgccctgcacatgcaggcccttccccctcgc.

[0662] In another example, in one embodiment, the agent which enhances the activity of a CAR-expressing cell can be a costimulatory molecule or costimulatory molecule ligand. Examples of costimulatory molecules include MHC class I molecule, BTLA and a Toll ligand receptor, as well as OX40, CD27, CD28, CDS, ICAM-1, LFA-1 (CD11a/CD18), ICOS (CD278), and 4-1BB (CD137). Further examples of such costimulatory molecules include CDS, ICAM-1, GITR, BAFFR, HVEM (LIGHTR), SLAMF7, NKp80 (KLRF1), NKp44, NKp30, NKp46, CD160, CD19, CD4, CD8alpha, CD8beta, IL2R beta, IL2R gamma, IL7R alpha, ITGA4, VLA1, CD49a, ITGA4, IA4, CD49D, ITGA6, VLA-6, CD49f, ITGAD, CD11d, ITGAE, CD103, ITGAL, CD11a, LFA-1, ITGAM, CD11b, ITGAX, CD11c, ITGB1, CD29, ITGB2, CD18, LFA-1, ITGB7, NKG2D, NKG2C, TNFR2, TRANCE/RANKL, DNAM1 (CD226), SLAMF4 (CD244, 2B4), CD84, CD96 (Tactile), CEACAM1, CRTAM, Ly9 (CD229), CD160 (BY55), PSGL1, CD100 (SEMA4D), CD69, SLAMF6 (NTB-A, Ly108), SLAM (SLAMF1, CD150, IPO-3), BLAME (SLAMF8), SELPLG (CD162), LTBR, LAT, GADS, SLP-76, PAG/Cbp, CD19a, and a ligand that specifically binds with CD83, e.g., as described herein. Examples of costimulatory molecule ligands include CD80, CD86, CD40L, ICOSL, CD70, OX40L, 4-1BBL, GITRL, and LIGHT. In embodiments, the costimulatory molecule ligand is a ligand for a costimulatory molecule different from the costimulatory molecule domain of the CAR. In embodiments, the costimulatory molecule ligand is a ligand for a costimulatory molecule that is the same as the costimulatory molecule domain of the CAR. In an embodiment, the costimulatory molecule ligand is 4-1BBL. In an embodiment, the costimulatory ligand is CD80 or CD86. In an embodiment, the costimulatory molecule ligand is CD70. In embodiments, a CAR-expressing immune effector cell described herein can be further engineered to express one or more additional costimulatory molecules or costimulatory molecule ligands.

Co-Expression of CAR with a Chemokine Receptor

[0663] In embodiments, the CAR-expressing cell described herein further comprises a chemokine receptor molecule. Transgenic expression of chemokine receptors CCR2b or CXCR2 in T cells enhances trafficking to CCL2- or CXCL1-secreting solid tumors including melanoma and neuroblastoma (Craddock et al., J Immunother. 2010 October; 33(8):780-8 and Kershaw et al., Hum Gene Ther. 2002 Nov. 1; 13(16):1971-80). Thus, without wishing to be bound by theory, it is believed that chemokine receptors expressed in CAR-expressing cells that recognize chemokines secreted by tumors, e.g., solid tumors, can improve homing of the CAR-expressing cell to the tumor, facilitate the infiltration of the CAR-expressing cell to the tumor, and enhances antitumor efficacy of the CAR-expressing cell. The chemokine receptor molecule can comprise a naturally occurring or recombinant chemokine receptor or a chemokine-binding fragment thereof. A chemokine receptor molecule suitable for expression in a CAR-expressing cell described herein include a CXC chemokine receptor (e.g., CXCR1, CXCR2, CXCR3, CXCR4, CXCR5, CXCR6, or CXCR7), a CC chemokine receptor (e.g., CCR1, CCR2, CCR3, CCR4, CCR5, CCR6, CCR7, CCR8, CCR9, CCR10, or CCR11), a CX3C chemokine receptor (e.g., CX3CR1), a XC chemokine receptor (e.g., XCR1), or a chemokine-binding fragment thereof. In one embodiment, the chemokine receptor molecule to be expressed with a CAR described herein is selected based on the chemokine(s) secreted by the tumor. In one embodiment, the CAR-expressing cell described herein further comprises, e.g., expresses, a CCR2b receptor or a CXCR2 receptor. In an embodiment, the CAR described herein and the chemokine receptor molecule are on the same vector or are on two different vectors. In embodiments where the CAR described herein and the chemokine receptor molecule are on the same vector, the CAR and the chemokine receptor molecule are each under control of two different promoters or are under the control of the same promoter.

### Conditional Expression of Immune Response-Enhancing Agents

[0664] Also provided herein are compositions and methods for conditionally expressing an agent that enhances the immune response or activity of a CAR-expressing cell described herein.

[0665] In one aspect, the present disclosure features an immune effector cell that is engineered to constitutively express a CAR, also referred to herein as a nonconditional CAR. In one embodiment, a nonconditional CAR as described herein comprises an antigen binding domain that binds to a cancer associated antigen, e.g., CD19, CD10, CD20, CD22, CD34, CD123, FLT-3, or ROR1. In embodiments, the nonconditional CAR-expressing immune effector cell further comprises a conditionally-expressed agent that enhances the therapeutic efficacy, e.g., the immune response, of the CAR-expressing immune effector cell. In such embodiments, the expression of the conditionally expressed agent occurs upon activation of the nonconditional CAR-expressing immune effector cell, e.g., upon binding of the nonconditional CAR molecule to its target, e.g., a cancer associated antigen, e.g., CD19, CD10, CD20, CD22, CD34, CD123, FLT-3, or ROR1.

[0666] Immune response-enhancing agents as described herein can be characterized by one or more of the following: 1) targets or binds to a different cancer associated antigen than that targeted by the nonconditional CAR; 2) inhibits the expression or activity of an immune checkpoint or inhibitory molecule; and/or 3) activates the expression and/or secretion of a component that enhances immune response or activation of an immune effector cell. The immune response-enhancing agent can be a polypeptide or a nucleic acid, e.g., a nucleic acid that encodes a polypeptide that enhances immune response. Examples of conditionally expressed agents that enhance the immune response include, but are not limited to, an additional CAR (referred to as a conditional CAR); a TCR-based molecule (e.g., a TCR-CAR); an inhibitor of an immune checkpoint or an inhibitory molecule; and/or a cytokine. In embodiments, the conditional CAR binds to a different cancer associated antigen than that targeted by the nonconditional CAR. In embodiments, the inhibitor of an immune checkpoint or inhibitory molecule described herein is an antibody or antigen binding fragment thereof, an inhibitory nucleic acid (e.g., an siRNA or shRNA), or a small molecule that inhibits or decreases the activity of an immune checkpoint or inhibitory molecule selected from PD1, PD-L1, CTLA4, TIM3, CEACAM (e.g., CEACAM-1, CEACAM-3 and/or CEACAM-5), LAGS, VISTA, BTLA, TIGIT, LAIR1, CD160, 2B4, CD80, CD86, B7-H3 (CD276), B7-H4 (VTCN1), HVEM (TNFRSF14 or CD270), KIR, A2aR, MHC class I, MHC class II, GALS, adenosine, or TGF beta. In embodiments, the cytokine comprises IL-2, IL-7, IL-15, or IL-21, or functional fragments or derivatives thereof.

[0667] In embodiments, the immune effector cell comprises a nonconditional CAR and one or more conditional CARs, where the conditional CAR binds to a different cancer associated antigen than that targeted by the nonconditional CAR. By way of example, in one embodiment, an immune effector cell comprises a nonconditional CAR that binds to CD19 and one or more conditional CARs that bind to CD10, CD20, CD22, CD34, CD123, FLT-3, or ROR1, or a combination thereof. In another embodiment, an immune effector cell comprises a nonconditional CAR that binds to CD10, CD20, CD22, CD34, CD123, FLT-3, or ROR1 and a conditional CAR that binds to CD19.

[0668] Conditional expression of the agent that enhances the immune response upon activation of the CAR-expressing immune effector cell is achieved by operatively linking an activation-conditional control region to the agent that enhances the immune response (e.g., to a nucleic acid sequence encoding such an agent). In one embodiment, the activation conditional control region comprises a promoter sequence that initiates expression, e.g., transcription, of the operatively linked immune response enhancing agent upon activation of the immune effector cell. In one embodiment, the activation conditional control region comprises one or more regulatory sequences (e.g., a transcription factor binding sequence or site) that facilitate the initiation of expression upon activation of the immune effector cell. In embodiments, the activation-conditional control region comprises a promoter sequence and/or one or more transcription factor binding sequences from a promoter or regulatory sequence of a gene that is upregulated upon one or more of the following: immune effector cell (e.g., T cell) activation, T-cell differentiation, T-cell polarization, or helper T cell development. Examples of such genes include, but are not limited to, NFAT (nuclear factor of activated T cells), ATF2 (activating transcription factor 2), NF-□B (nuclear factor-□B), IL-2, IL-2 receptor (IL-2R), IL-3, GM-CSF, IL-4, IL-10, and IFN-γ.

[0669] In one embodiment, the activation-conditional control region comprises one or more, e.g., 1, 2, 3, 4, 5, 6, or more, NFAT binding sequences or sites. In embodiments, the NFAT-binding sequence in the promoter comprises (5′-GGAAA-3′) (SEQ ID NO: 1312), optionally situated in a longer consensus sequence of 5′ (A/T)GGAAA(A/N)(A/T/C)N 3′ (SEQ ID NO: 1313). In embodiments, the NFAT-binding sequence is a Kb-like sequence such as GGGACT (SEQ ID NO: 1314). (See, Gibson et al., The Journal of Immunology, 2007, 179: 3831-3840.)

[0670] In one embodiment, the activation-conditional control region further comprises an IL-2 promoter (or a minimal IL-2 promoter), an IL-2R promoter, an ATF2 promoter, or a NF-□B promoter, or any functional fragment or derivative thereof. In one embodiment, the activation-conditional control region comprises one or more NFAT-binding sequences, e.g., 3 or 6 NFAT-binding sequences, and an IL-2 promoter, e.g., an IL-2 minimal promoter. In one embodiment, the activation-conditional control region comprises the sequence of

(SEQ ID NO: 1315)

AGCTTGGATCCAAGAGGAAAATTTGTTTCATACAGAAGGCGTTAAGAGGA
AAATTTGTTTCATACAGAAGGCGTTAAGAGGAAAATTTGTTTCATACAGA
AGGCGTTCAAGCTTGTCGAC.

### Sources of Cells

[0671] Prior to expansion and genetic modification or other modification, a source of cells, e.g., T cells or natural killer (NK) cells, can be obtained from a subject. Examples of subjects include humans, monkeys, chimpanzees, dogs, cats, mice, rats, and transgenic species thereof. T cells can be obtained from a number of sources, including peripheral blood mononuclear cells, bone marrow, lymph node tissue, cord blood, thymus tissue, tissue from a site of infection, ascites, pleural effusion, spleen tissue, and tumors.

[0672] In embodiments, immune effector cells (e.g., a population of immune effector cells), e.g., T cells, are derived from (e.g., differentiated from) a stem cell, e.g., an embryonic stem cell or a pluripotent stem cell, e.g., an induced pluripotent stem cell (iPSC). In embodiments, the cells are autologous or allogeneic. In embodiments wherein the cells are allogeneic, the cells, e.g., derived from stem cells (e.g., iPSCs), are modified to reduce their alloreactivity. For example, the cells can be modified to reduce alloreactivity, e.g., by modifying (e.g., disrupting) their T cell receptor. In embodiments, a site specific nuclease can be used to disrupt the T cell receptor, e.g., after T-cell differentiation. In other examples, cells, e.g., T cells derived from iPSCs, can be generated from virus-specific T cells, which are less likely to cause graft-versus-host disease because of their recognition of a pathogen-derived antigen. In yet other examples, alloreactivity can be reduced, e.g., minimized, by generating iPSCs from common HLA haplotypes such that they are histocompatible with matched, unrelated recipient subjects. In yet other examples, alloreactivity can be reduced, e.g., minimized, by repressing HLA expression through genetic modification. For example, T cells derived from iPSCs can be processed as described in, e.g., Themeli et al. Nat. Biotechnol. 31.10(2013):928-35, incorporated herein by reference. In some examples, immune effector cells, e.g., T cells, derived from stem cells, can be processed/generated using methods described in WO2014/165707, incorporated herein by reference.

[0673] In certain aspects of the present disclosure, immune effector cells, e.g., T cells, can be obtained from a unit of blood collected from a subject using any number of techniques known to the skilled artisan, such as Ficoll™ separation. In one aspect, cells from the circulating blood of an individual are obtained by apheresis. The apheresis product typically contains lymphocytes, including T cells, monocytes, granulocytes, B cells, other nucleated white blood cells, red blood cells, and platelets. In one aspect, the cells collected by apheresis may be washed to remove the plasma fraction and, optionally, to place the cells in an appropriate buffer or media for subsequent processing steps. In one embodiment, the cells are washed with phosphate buffered saline (PBS). In an alternative embodiment, the wash solution lacks calcium and may lack magnesium or may lack many if not all divalent cations.

[0674] Initial activation steps in the absence of calcium can lead to magnified activation. As those of ordinary skill in the art would readily appreciate a washing step may be accomplished by methods known to those in the art, such as by using a semi-automated “flow-through” centrifuge (for example, the Cobe 2991 cell processor, the Baxter CytoMate, or the Haemonetics Cell Saver 5) according to the manufacturer's instructions. After washing, the cells may be resuspended in a variety of biocompatible buffers, such as, for example, Ca-free, Mg-free PBS, PlasmaLyte A, or other saline solution with or without buffer. Alternatively, the undesirable components of the apheresis sample may be removed and the cells directly resuspended in culture media.

[0675] It is recognized that the methods of the application can utilize culture media conditions comprising 5% or less, for example 2%, human AB serum, and employ known culture media conditions and compositions, for example those described in Smith et al., “Ex vivo expansion of human T cells for adoptive immunotherapy using the novel Xeno-free CTS Immune Cell Serum Replacement” Clinical & Translational Immunology (2015) 4, e31; doi:10.1038/cti.2014.31.

[0676] In one aspect, T cells are isolated from peripheral blood lymphocytes by lysing the red blood cells and depleting the monocytes, for example, by centrifugation through a PERCOLL™ gradient or by counterflow centrifugal elutriation.

[0677] The methods described herein can include, e.g., selection of a specific subpopulation of immune effector cells, e.g., T cells, that are a T regulatory cell-depleted population, CD25+ depleted cells, using, e.g., a negative selection technique, e.g., described herein. In some embodiments, the population of T regulatory depleted cells contains less than 30%, 25%, 20%, 15%, 10%, 5%, 4%, 3%, 2%, 1% of CD25+ cells.

[0678] In one embodiment, T regulatory cells, e.g., CD25+ T cells, are removed from the population using an anti-CD25 antibody, or fragment thereof, or a CD25-binding ligand, IL-2. In one embodiment, the anti-CD25 antibody, or fragment thereof, or CD25-binding ligand is conjugated to a substrate, e.g., a bead, or is otherwise coated on a substrate, e.g., a bead. In one embodiment, the anti-CD25 antibody, or fragment thereof, is conjugated to a substrate as described herein.

[0679] In one embodiment, the T regulatory cells, e.g., CD25+ T cells, are removed from the population using CD25 depletion reagent from Miltenyi™. In one embodiment, the ratio of cells to CD25 depletion reagent is 1e7 cells to 20 uL, or 1e7 cells to 15 uL, or 1e7 cells to 10 uL, or 1e7 cells to 5 uL, or 1e7 cells to 2.5 uL, or 1e7 cells to 1.25 uL. In one embodiment, e.g., for T regulatory cells, e.g., CD25+ depletion, greater than 500 million cells/ml is used. In a further aspect, a concentration of cells of 600, 700, 800, or 900 million cells/ml is used.

[0680] In one embodiment, the population of immune effector cells to be depleted includes about 6×10⁹ CD25+ T cells. In other aspects, the population of immune effector cells to be depleted include about 1×10⁹ to 1×10¹⁰ CD25+ T cell, and any integer value in between. In one embodiment, the resulting population T regulatory depleted cells has 2×10⁹ T regulatory cells, e.g., CD25+ cells, or less (e.g., 1×10⁹, 5×10⁸, 1×10⁸, 5×10⁷, 1×10⁷, or less CD25+ cells).

[0681] In one embodiment, the T regulatory cells, e.g., CD25+ cells, are removed from the population using the CliniMAC system with a depletion tubing set, such as, e.g., tubing 162-01. In one embodiment, the CliniMAC system is run on a depletion setting such as, e.g., DEPLETION2.1.

[0682] Without wishing to be bound by a particular theory, decreasing the level of negative regulators of immune cells (e.g., decreasing the number of unwanted immune cells, e.g., T_{REG} cells), in a subject prior to apheresis or during manufacturing of a CAR-expressing cell product significantly reduces the risk of subject relapse. For example, methods of depleting T_{REG} cells are known in the art. Methods of decreasing T_{REG} cells include, but are not limited to, cyclophosphamide, anti-GITR antibody (an anti-GITR antibody described herein), CD25-depletion, mTOR inhibitor, and combinations thereof.

[0683] In some embodiments, the manufacturing methods comprise reducing the number of (e.g., depleting) T_{REG} cells prior to manufacturing of the CAR-expressing cell. For example, manufacturing methods comprise contacting the sample, e.g., the apheresis sample, with an anti-GITR antibody and/or an anti-CD25 antibody (or fragment thereof, or a CD25-binding ligand), e.g., to deplete T_{REG} cells prior to manufacturing of the CAR-expressing cell (e.g., T cell, NK cell) product.

[0684] Without wishing to be bound by a particular theory, decreasing the level of negative regulators of immune cells (e.g., decreasing the number of unwanted immune cells, e.g., T_{REG} cells), in a subject prior to apheresis or during manufacturing of a CAR-expressing cell product can reduce the risk of a T_{REG} relapse. In an embodiment, a subject is pre-treated with one or more therapies that reduce T_{REG} cells prior to collection of cells for CAR-expressing cell product manufacturing, thereby reducing the risk of subject relapse to CAR-expressing cell treatment. In an embodiment, methods of decreasing T_{REG} cells include, but are not limited to, administration to the subject of one or more of cyclophosphamide, anti-GITR antibody, CD25-depletion, or a combination thereof. In an embodiment, methods of decreasing T_{REG} cells include, but are not limited to, administration to the subject of one or more of cyclophosphamide, anti-GITR antibody, CD25-depletion, mTOR inhibitor, or a combination thereof. Administration of one or more of cyclophosphamide, anti-GITR antibody, CD25-depletion, or a combination thereof, can occur before, during or after an infusion of the CAR-expressing cell product. Administration of one or more of cyclophosphamide, anti-GITR antibody, CD25-depletion, mTOR inhibitor, or a combination thereof, can occur before, during or after an infusion of the CAR-expressing cell product.

[0685] In some embodiments, the manufacturing methods comprise reducing the number of (e.g., depleting) T_{REG} cells prior to manufacturing of the CAR-expressing cell. For example, manufacturing methods comprise contacting the sample, e.g., the apheresis sample, with an anti-GITR antibody and/or an anti-CD25 antibody (or fragment thereof, or a CD25-binding ligand), e.g., to deplete T_{REG} cells prior to manufacturing of the CAR-expressing cell (e.g., T cell, NK cell) product.

[0686] In an embodiment, a subject is pre-treated with one or more therapies that reduce T_{REG} cells prior to collection of cells for CAR-expressing cell product manufacturing, thereby reducing the risk of subject relapse to CAR-expressing cell treatment. In an embodiment, methods of decreasing T_{REG} cells include, but are not limited to, administration to the subject of one or more of cyclophosphamide, anti-GITR antibody, CD25-depletion, or a combination thereof. Administration of one or more of cyclophosphamide, anti-GITR antibody, CD25-depletion, or a combination thereof, can occur before, during or after an infusion of the CAR-expressing cell product.

[0687] In an embodiment, a subject is pre-treated with cyclophosphamide prior to collection of cells for CAR-expressing cell product manufacturing, thereby reducing the risk of subject relapse to CAR-expressing cell treatment. In an embodiment, a subject is pre-treated with an anti-GITR antibody prior to collection of cells for CAR-expressing cell product manufacturing, thereby reducing the risk of subject relapse to CAR-expressing cell treatment.

[0688] In one embodiment, the population of cells to be removed are neither the regulatory T cells or tumor cells, but cells that otherwise negatively affect the expansion and/or function of CART cells, e.g. cells expressing CD14, CD11b, CD33, CD15, or other markers expressed by potentially immune suppressive cells. In one embodiment, such cells are envisioned to be removed concurrently with regulatory T cells and/or tumor cells, or following said depletion, or in another order.

[0689] The methods described herein can include more than one selection step, e.g., more than one depletion step. Enrichment of a T cell population by negative selection can be accomplished, e.g., with a combination of antibodies directed to surface markers unique to the negatively selected cells. One method is cell sorting and/or selection via negative magnetic immunoadherence or flow cytometry that uses a cocktail of monoclonal antibodies directed to cell surface markers present on the cells negatively selected. For example, to enrich for CD4+ cells by negative selection, a monoclonal antibody cocktail can include antibodies to CD14, CD20, CD11b, CD16, HLA-DR, and CD8.

[0690] The methods described herein can further include removing cells from the population which express a tumor antigen, e.g., a tumor antigen that does not comprise CD25, e.g., CD19, CD30, CD38, CD123, CD20, CD14 or CD11b, to thereby provide a population of T regulatory depleted, e.g., CD25+ depleted, and tumor antigen depleted cells that are suitable for expression of a CAR, e.g., a CAR described herein. In one embodiment, tumor antigen expressing cells are removed simultaneously with the T regulatory, e.g., CD25+ cells. For example, an anti-CD25 antibody, or fragment thereof, and an anti-tumor antigen antibody, or fragment thereof, can be attached to the same substrate, e.g., bead, which can be used to remove the cells or an anti-CD25 antibody, or fragment thereof, or the anti-tumor antigen antibody, or fragment thereof, can be attached to separate beads, a mixture of which can be used to remove the cells. In other embodiments, the removal of T regulatory cells, e.g., CD25+ cells, and the removal of the tumor antigen expressing cells is sequential, and can occur, e.g., in either order.

[0691] Also provided are methods that include removing cells from the population which express a check point inhibitor, e.g., a check point inhibitor described herein, e.g., one or more of PD1+ cells, LAG3+ cells, and TIM3+ cells, to thereby provide a population of T regulatory depleted, e.g., CD25+ depleted cells, and check point inhibitor depleted cells, e.g., PD1+, LAG3+ and/or TIM3+ depleted cells. Exemplary check point inhibitors include PD1, PD-L1, PD-L2, CTLA4, TIM3, CEACAM (e.g., CEACAM-1, CEACAM-3 and/or CEACAM-5), LAG3, VISTA, BTLA, TIGIT, LAIR1, CD160, 2B4, CD80, CD86, B7-H3 (CD276), B7-H4 (VTCN1), HVEM (TNFRSF14 or CD270), KIR, A2aR, MHC class I, MHC class II, GALS, adenosine, and TGF (e.g., TGF beta), e.g., as described herein. In one embodiment, check point inhibitor expressing cells are removed simultaneously with the T regulatory, e.g., CD25+ cells. For example, an anti-CD25 antibody, or fragment thereof, and an anti-check point inhibitor antibody, or fragment thereof, can be attached to the same bead which can be used to remove the cells, or an anti-CD25 antibody, or fragment thereof, and the anti-check point inhibitor antibody, or fragment thereof, can be attached to separate beads, a mixture of which can be used to remove the cells. In other embodiments, the removal of T regulatory cells, e.g., CD25+ cells, and the removal of the check point inhibitor expressing cells is sequential, and can occur, e.g., in either order.

[0692] Methods described herein can include a positive selection step. For example, T cells can be isolated by incubation with anti-CD3/anti-CD28 (e.g., 3×28)-conjugated beads, such as DYNABEADS® M-450 CD3/CD28 T, for a time period sufficient for positive selection of the desired T cells. In one aspect, the time period is about 30 minutes. In a further aspect, the time period ranges from 30 minutes to 36 hours or longer and all integer values there between. In a further aspect, the time period is at least 1, 2, 3, 4, 5, or 6 hours. In yet another aspect, the time period is 10 to 24 hours. In one aspect, the incubation time period is 24 hours. Longer incubation times may be used to isolate T cells in any situation where there are few T cells as compared to other cell types, such in isolating tumor infiltrating lymphocytes (TIL) from tumor tissue or from immunocompromised individuals. Further, use of longer incubation times can increase the efficiency of capture of CD8+ T cells. Thus, by simply shortening or lengthening the time T cells are allowed to bind to the CD3/CD28 beads and/or by increasing or decreasing the ratio of beads to T cells (as described further herein), subpopulations of T cells can be preferentially selected for or against at culture initiation or at other time points during the process. Additionally, by increasing or decreasing the ratio of anti-CD3 and/or anti-CD28 antibodies on the beads or other surface, subpopulations of T cells can be preferentially selected for or against at culture initiation or at other desired time points.

[0693] In one embodiment, a T cell population can be selected that expresses one or more of IFN-γ, TNFα, IL-17A, IL-2, IL-3, IL-4, GM-CSF, IL-10, IL-13, granzyme B, and perforin, or other appropriate molecules, e.g., other cytokines. Methods for screening for cell expression can be determined, e.g., by the methods described in PCT Publication No.: WO 2013/126712.

[0694] For isolation of a desired population of cells by positive or negative selection, the concentration of cells and surface (e.g., particles such as beads) can be varied. In certain aspects, it may be desirable to significantly decrease the volume in which beads and cells are mixed together (e.g., increase the concentration of cells), to ensure maximum contact of cells and beads. For example, in one aspect, a concentration of about 10 billion cells/ml, 9 billion/ml, 8 billion/ml, 7 billion/ml, 6 billion/ml, or 5 billion/ml is used. In one aspect, a concentration of 1 billion cells/ml is used. In one aspect, a concentration of cells from 75, 80, 85, 90, 95, or 100 million cells/ml is used. In further aspects, concentrations of 125 or 150 million cells/ml can be used.

[0695] Using high concentrations can result in increased cell yield, cell activation, and cell expansion. Further, use of high cell concentrations allows more efficient capture of cells that may weakly express target antigens of interest, such as CD28-negative T cells, or from samples where there are many tumor cells present (e.g., leukemic blood, tumor tissue, etc.). Such populations of cells may have therapeutic value and would be desirable to obtain. For example, using high concentration of cells allows more efficient selection of CD8+ T cells that normally have weaker CD28 expression.

[0696] In a related aspect, it may be desirable to use lower concentrations of cells. By significantly diluting the mixture of T cells and surface (e.g., particles such as beads), interactions between the particles and cells is minimized. This selects for cells that express high amounts of desired antigens to be bound to the particles. For example, CD4+ T cells express higher levels of CD28 and are more efficiently captured than CD8+ T cells in dilute concentrations. In one aspect, the concentration of cells used is 5×10⁶/ml. In other aspects, the concentration used can be from about 1×10⁵/ml to 1×10⁶/ml, and any integer value in between.

[0697] In other aspects, the cells may be incubated on a rotator for varying lengths of time at varying speeds at either 2-10° C. or at room temperature.

[0698] T cells for stimulation can also be frozen after a washing step. Wishing not to be bound by theory, the freeze and subsequent thaw step provides a more uniform product by removing granulocytes and to some extent monocytes in the cell population. After the washing step that removes plasma and platelets, the cells may be suspended in a freezing solution. While many freezing solutions and parameters are known in the art and will be useful in this context, one method involves using PBS containing 20% DMSO and 8% human serum albumin, or culture media containing 10% Dextran 40 and 5% Dextrose, 20% Human Serum Albumin and 7.5% DMSO, or 31.25% Plasmalyte-A, 31.25% Dextrose 5%, 0.45% NaCl, 10% Dextran 40 and 5% Dextrose, 20% Human Serum Albumin, and 7.5% DMSO or other suitable cell freezing media containing for example, Hespan and PlasmaLyte A, the cells then are frozen to −80° C. at a rate of 1° per minute and stored in the vapor phase of a liquid nitrogen storage tank. Other methods of controlled freezing may be used as well as uncontrolled freezing immediately at −20° C. or in liquid nitrogen.

[0699] In certain aspects, cryopreserved cells are thawed and washed as described herein and allowed to rest for one hour at room temperature prior to activation using the methods of the present invention.

[0700] Also contemplated in the context of the invention is the collection of blood samples or apheresis product from a subject at a time period prior to when the expanded cells as described herein might be needed. As such, the source of the cells to be expanded can be collected at any time point necessary, and desired cells, such as T cells, isolated and frozen for later use in immune effector cell therapy for any number of diseases or conditions that would benefit from immune effector cell therapy, such as those described herein. In one aspect a blood sample or an apheresis is taken from a generally healthy subject. In certain aspects, a blood sample or an apheresis is taken from a generally healthy subject who is at risk of developing a disease, but who has not yet developed a disease, and the cells of interest are isolated and frozen for later use. In certain aspects, the T cells may be expanded, frozen, and used at a later time. In certain aspects, samples are collected from a patient shortly after diagnosis of a particular disease as described herein but prior to any treatments. In a further aspect, the cells are isolated from a blood sample or an apheresis from a subject prior to any number of relevant treatment modalities, including but not limited to treatment with agents such as natalizumab, efalizumab, antiviral agents, chemotherapy, radiation, immunosuppressive agents, such as cyclosporin, azathioprine, methotrexate, mycophenolate, and FK506, antibodies, or other immunoablative agents such as CAMPATH, anti-CD3 antibodies, cytoxan, fludarabine, cyclosporin, FK506, rapamycin, mycophenolic acid, steroids, FR901228, and irradiation.

[0701] In a further aspect of the present invention, T cells are obtained from a patient directly following treatment that leaves the subject with functional T cells. In this regard, it has been observed that following certain cancer treatments, in particular treatments with drugs that damage the immune system, shortly after treatment during the period when patients would normally be recovering from the treatment, the quality of T cells obtained may be optimal or improved for their ability to expand ex vivo. Likewise, following ex vivo manipulation using the methods described herein, these cells may be in a preferred state for enhanced engraftment and in vivo expansion. Thus, it is contemplated within the context of the present invention to collect blood cells, including T cells, dendritic cells, or other cells of the hematopoietic lineage, during this recovery phase. Further, in certain aspects, mobilization (for example, mobilization with GM-CSF) and conditioning regimens can be used to create a condition in a subject wherein repopulation, recirculation, regeneration, and/or expansion of particular cell types is favored, especially during a defined window of time following therapy. Illustrative cell types include T cells, B cells, dendritic cells, and other cells of the immune system.

[0702] In one embodiment, the immune effector cells expressing a CAR molecule, e.g., a CAR molecule described herein, are obtained from a subject that has received a low, immune enhancing dose of an mTOR inhibitor. In an embodiment, the population of immune effector cells, e.g., T cells, to be engineered to express a CAR, are harvested after a sufficient time, or after sufficient dosing of the low, immune enhancing, dose of an mTOR inhibitor, such that the level of PD1 negative immune effector cells, e.g., T cells, or the ratio of PD1 negative immune effector cells, e.g., T cells/PD1 positive immune effector cells, e.g., T cells, in the subject or harvested from the subject has been, at least transiently, increased.

[0703] In other embodiments, population of immune effector cells, e.g., T cells, which have, or will be engineered to express a CAR, can be treated ex vivo by contact with an amount of an mTOR inhibitor that increases the number of PD1 negative immune effector cells, e.g., T cells or increases the ratio of PD1 negative immune effector cells, e.g., T cells/PD1 positive immune effector cells, e.g., T cells.

[0704] In one embodiment, a T cell population is diacylglycerol kinase (DGK)-deficient. DGK-deficient cells include cells that do not express DGK RNA or protein, or have reduced or inhibited DGK activity. DGK-deficient cells can be generated by genetic approaches, e.g., administering RNA-interfering agents, e.g., siRNA, shRNA, miRNA, to reduce or prevent DGK expression. Alternatively, DGK-deficient cells can be generated by treatment with DGK inhibitors described herein.

[0705] In one embodiment, a T cell population is Ikaros-deficient. Ikaros-deficient cells include cells that do not express Ikaros RNA or protein, or have reduced or inhibited Ikaros activity, Ikaros-deficient cells can be generated by genetic approaches, e.g., administering RNA-interfering agents, e.g., siRNA, shRNA, miRNA, to reduce or prevent Ikaros expression. Alternatively, Ikaros-deficient cells can be generated by treatment with Ikaros inhibitors, e.g., lenalidomide.

[0706] In embodiments, a T cell population is DGK-deficient and Ikaros-deficient, e.g., does not express DGK and Ikaros, or has reduced or inhibited DGK and Ikaros activity. Such DGK and Ikaros-deficient cells can be generated by any of the methods described herein.

[0707] In an embodiment, the NK cells are obtained from the subject. In another embodiment, the NK cells are an NK cell line, e.g., NK-92 cell line (Conkwest).

### Allogeneic CAR

[0708] In embodiments described herein, the immune effector cell can be an allogeneic immune effector cell, e.g., T cell or NK cell. For example, the cell can be an allogeneic T cell, e.g., an allogeneic T cell lacking expression of a functional T cell receptor (TCR) and/or human leukocyte antigen (HLA), e.g., HLA class I and/or HLA class II.

[0709] A T cell lacking a functional TCR can be, e.g., engineered such that it does not express any functional TCR on its surface, engineered such that it does not express one or more subunits that comprise a functional TCR (e.g., engineered such that it does not express (or exhibits reduced expression) of TCR alpha, TCR beta, TCR gamma, TCR delta, TCR epsilon, and/or TCR zeta) or engineered such that it produces very little functional TCR on its surface (e.g., engineered such that it does not express (or exhibits reduced expression) of TCR alpha, TCR beta, TCR gamma, TCR delta, TCR epsilon, and/or TCR zeta). Alternatively, the T cell can express a substantially impaired TCR, e.g., by expression of mutated or truncated forms of one or more of the subunits of the TCR. The term “substantially impaired TCR” means that this TCR will not elicit an adverse immune reaction in a host.

[0710] A T cell described herein can be, e.g., engineered such that it does not express a functional HLA on its surface. For example, a T cell described herein, can be engineered such that cell surface expression HLA, e.g., HLA class 1 and/or HLA class II, is downregulated. In some embodiments, downregulation of HLA may be accomplished by reducing or eliminating expression of beta-2 microglobulin (B2M).

[0711] In some embodiments, the T cell can lack a functional TCR and a functional HLA, e.g., HLA class I and/or HLA class II.

[0712] Modified T cells that lack expression of a functional TCR and/or HLA can be obtained by any suitable means, including a knock out or knock down of one or more subunit of TCR or HLA. For example, the T cell can include a knock down of TCR and/or HLA using siRNA, shRNA, clustered regularly interspaced short palindromic repeats (CRISPR) transcription-activator like effector nuclease (TALEN), or zinc finger endonuclease (ZFN).

[0713] In some embodiments, the allogeneic cell can be a cell which does not express or expresses at low levels an inhibitory molecule, e.g. a cell engineered by any method described herein. For example, the cell can be a cell that does not express or expresses at low levels an inhibitory molecule, e.g., that can decrease the ability of a CAR-expressing cell to mount an immune effector response. Examples of inhibitory molecules include PD1, PD-L1, PD-L2, CTLA4, TIM3, CEACAM (e.g., CEACAM-1, CEACAM-3 and/or CEACAM-5), LAGS, VISTA, BTLA, TIGIT, LAIR1, CD160, 2B4, CD80, CD86, B7-H3 (CD276), B7-H4 (VTCN1), HVEM (TNFRSF14 or CD270), KIR, A2aR, MHC class I, MHC class II, GALS, adenosine, and TGF (e.g., TGF beta). Inhibition of an inhibitory molecule, e.g., by inhibition at the DNA, RNA or protein level, can optimize a CAR-expressing cell performance. In embodiments, an inhibitory nucleic acid, e.g., an inhibitory nucleic acid, e.g., a dsRNA, e.g., an siRNA or shRNA, a clustered regularly interspaced short palindromic repeats (CRISPR), a transcription-activator like effector nuclease (TALEN), or a zinc finger endonuclease (ZFN), e.g., as described herein, can be used.

siRNA and shRNA to Inhibit TCR or HLA

[0714] In some embodiments, TCR expression and/or HLA expression can be inhibited using siRNA or shRNA that targets a nucleic acid encoding a TCR and/or HLA, and/or an inhibitory molecule described herein (e.g., PD1, PD-L1, PD-L2, CTLA4, TIM3, CEACAM (e.g., CEACAM-1, CEACAM-3 and/or CEACAM-5), LAG3, VISTA, BTLA, TIGIT, LAIR1, CD160, 2B4, CD80, CD86, B7-H3 (CD276), B7-H4 (VTCN1), HVEM (TNFRSF14 or CD270), KIR, A2aR, MHC class I, MHC class II, GAL9, adenosine, and TGF beta), in a T cell.

[0715] Expression systems for siRNA and shRNAs, and exemplary shRNAs, are described, e.g., in paragraphs 649 and 650 of International Application WO2015/142675, filed Mar. 13, 2015, which is incorporated by reference in its entirety.

### CRISPR to Inhibit TCR or HLA

[0716] “CRISPR” or “CRISPR to TCR and/or HLA” or “CRISPR to inhibit TCR and/or HLA” as used herein refers to a set of clustered regularly interspaced short palindromic repeats, or a system comprising such a set of repeats. “Cas”, as used herein, refers to a CRISPR-associated protein. A “CRISPR/Cas” system refers to a system derived from CRISPR and Cas which can be used to silence or mutate a TCR and/or HLA gene, and/or an inhibitory molecule described herein (e.g., PD1, PD-L1, PD-L2, CTLA4, TIM3, CEACAM (e.g., CEACAM-1, CEACAM-3 and/or CEACAM-5), LAG3, VISTA, BTLA, TIGIT, LAIR1, CD160, 2B4, CD80, CD86, B7-H3 (CD276), B7-H4 (VTCN1), HVEM (TNFRSF14 or CD270), KIR, A2aR, MHC class I, MHC class II, GAL9, adenosine, and TGF beta).

[0717] The CRISPR/Cas system, and uses thereof, are described, e.g., in paragraphs 651-658 of International Application WO2015/142675, filed Mar. 13, 2015, which is incorporated by reference in its entirety.

TALEN to Inhibit TCR and/or HLA

[0718] “TALEN” or “TALEN to HLA and/or TCR” or “TALEN to inhibit HLA and/or TCR” refers to a transcription activator-like effector nuclease, an artificial nuclease which can be used to edit the HLA and/or TCR gene, and/or an inhibitory molecule described herein (e.g., PD1, PD-L1, PD-L2, CTLA4, TIM3, CEACAM (e.g., CEACAM-1, CEACAM-3 and/or CEACAM-5), LAG3, VISTA, BTLA, TIGIT, LAIR1, CD160, 2B4, CD80, CD86, B7-H3 (CD276), B7-H4 (VTCN1), HVEM (TNFRSF14 or CD270), KIR, A2aR, MHC class I, MHC class II, GAL9, adenosine, and TGF beta).

[0719] TALENs, TALEs, and uses thereof, are described, e.g., in paragraphs 659-665 of International Application WO2015/142675, filed Mar. 13, 2015, which is incorporated by reference in its entirety.

Zinc Finger Nuclease to Inhibit HLA and/or TCR

[0720] “ZFN” or “Zinc Finger Nuclease” or “ZFN to HLA and/or TCR” or “ZFN to inhibit HLA and/or TCR” refer to a zinc finger nuclease, an artificial nuclease which can be used to edit the HLA and/or TCR gene, and/or an inhibitory molecule described herein (e.g., PD1, PD-L1, PD-L2, CTLA4, TIM3, CEACAM (e.g., CEACAM-1, CEACAM-3 and/or CEACAM-5), LAG3, VISTA, BTLA, TIGIT, LAIR1, CD160, 2B4, CD80, CD86, B7-H3 (CD276), B7-H4 (VTCN1), HVEM (TNFRSF14 or CD270), KIR, A2aR, MHC class I, MHC class II, GAL9, adenosine, and TGF beta).

[0721] ZFNs, and uses thereof, are described, e.g., in paragraphs 666-671 of International Application WO2015/142675, filed Mar. 13, 2015, which is incorporated by reference in its entirety.

### Telomerase Expression

[0722] While not wishing to be bound by any particular theory, in some embodiments, a therapeutic T cell has short term persistence in a patient, due to shortened telomeres in the T cell; accordingly, transfection with a telomerase gene can lengthen the telomeres of the T cell and improve persistence of the T cell in the patient. See Carl June, “Adoptive T cell therapy for cancer in the clinic”, Journal of Clinical Investigation, 117:1466-1476 (2007). Thus, in an embodiment, an immune effector cell, e.g., a T cell, ectopically expresses a telomerase subunit, e.g., the catalytic subunit of telomerase, e.g., TERT, e.g., hTERT. In some aspects, this disclosure provides a method of producing a CAR-expressing cell, comprising contacting a cell with a nucleic acid encoding a telomerase subunit, e.g., the catalytic subunit of telomerase, e.g., TERT, e.g., hTERT. The cell may be contacted with the nucleic acid before, simultaneous with, or after being contacted with a construct encoding a CAR.

[0723] In one aspect, the disclosure features a method of making a population of immune effector cells (e.g., T cells or NK cells). In an embodiment, the method comprises: providing a population of immune effector cells (e.g., T cells or NK cells), contacting the population of immune effector cells with a nucleic acid encoding a CAR; and contacting the population of immune effector cells with a nucleic acid encoding a telomerase subunit, e.g., hTERT, under conditions that allow for CAR and telomerase expression.

[0724] In an embodiment, the nucleic acid encoding the telomerase subunit is DNA. In an embodiment, the nucleic acid encoding the telomerase subunit comprises a promoter capable of driving expression of the telomerase subunit.

[0725] In an embodiment, hTERT has the amino acid sequence of GenBank Protein ID AAC51724.1 (Meyerson et al., “hEST2, the Putative Human Telomerase Catalytic Subunit Gene, Is Up-Regulated in Tumor Cells and during Immortalization” Cell Volume 90, Issue 4, 22 Aug. 1997, Pages 785-795) as disclosed on pages 233-234 of International Application WO 2016/164731, filed Apr. 8, 2016, which is incorporated by reference in its entirety.

[0726] In an embodiment, the hTERT has a sequence at least 80%, 85%, 90%, 95%, 96\hat{ }, 97%, 98%, or 99% identical to the sequence of SEQ ID NO: 1332. In an embodiment, the hTERT has a sequence of SEQ ID NO: 1332. In an embodiment, the hTERT comprises a deletion (e.g., of no more than 5, 10, 15, 20, or 30 amino acids) at the N-terminus, the C-terminus, or both. In an embodiment, the hTERT comprises a transgenic amino acid sequence (e.g., of no more than 5, 10, 15, 20, or 30 amino acids) at the N-terminus, the C-terminus, or both.

[0727] In an embodiment, the hTERT is encoded by the nucleic acid sequence of GenBank Accession No. AF018167 (Meyerson et al., “hEST2, the Putative Human Telomerase Catalytic Subunit Gene, Is Up-Regulated in Tumor Cells and during Immortalization” Cell Volume 90, Issue 4, 22 August 1997, Pages 785-795) as disclosed on pages 234-235 of International Application WO 2016/164731, filed Apr. 8, 2016, which is incorporated by reference in its entirety.

[0728] In an embodiment, the hTERT is encoded by a nucleic acid having a sequence at least 80%, 85%, 90%, 95%, 96, 97%, 98%, or 99% identical to the sequence of SEQ ID NO: 1333. In an embodiment, the hTERT is encoded by a nucleic acid of SEQ ID NO: 1333.

### Activation and Expansion of Immune Effector Cells (e.g., T Cells)

[0729] Immune effector cells such as T cells may be activated and expanded generally using methods as described, for example, in U.S. Pat. Nos. 6,352,694; 6,534,055; 6,905,680; 6,692,964; 5,858,358; 6,887,466; 6,905,681; 7,144,575; 7,067,318; 7,172,869; 7,232,566; 7,175,843; 5,883,223; 6,905,874; 6,797,514; 6,867,041; and U.S. Patent Application Publication No. 20060121005.

[0730] The procedure for ex vivo expansion of hematopoietic stem and progenitor cells is described in U.S. Pat. No. 5,199,942, incorporated herein by reference, can be applied to the cells of the present invention. Other suitable methods are known in the art, therefore the present invention is not limited to any particular method of ex vivo expansion of the cells. Briefly, ex vivo culture and expansion of T cells can comprise: (1) collecting CD34+ hematopoietic stem and progenitor cells from a mammal from peripheral blood harvest or bone marrow explants; and (2) expanding such cells ex vivo. In addition to the cellular growth factors described in U.S. Pat. No. 5,199,942, other factors such as flt3-L, IL-1, IL-3 and c-kit ligand, can be used for culturing and expansion of the cells.

[0731] Generally, a population of immune effector cells may be expanded by contact with a surface having attached thereto an agent that stimulates a CD3/TCR complex associated signal and a ligand that stimulates a costimulatory molecule on the surface of the T cells. In particular, T cell populations may be stimulated as described herein, such as by contact with an anti-CD3 antibody, or antigen-binding fragment thereof, or an anti-CD2 antibody immobilized on a surface, or by contact with a protein kinase C activator (e.g., bryostatin) in conjunction with a calcium ionophore. For co-stimulation of an accessory molecule on the surface of the T cells, a ligand that binds the accessory molecule is used. For example, a population of T cells can be contacted with an anti-CD3 antibody and an anti-CD28 antibody, under conditions appropriate for stimulating proliferation of the T cells. To stimulate proliferation of either CD4+ T cells or CD8+ T cells, an anti-CD3 antibody and an anti-CD28 antibody may be used. Examples of an anti-CD28 antibody include 9.3, B-T3, XR-CD28 (Diaclone, Besancon, France) can be used as can other methods commonly known in the art (Berg et al., Transplant Proc. 30(8):3975-3977, 1998; Haanen et al., J. Exp. Med. 190(9):13191328, 1999; Garland et al., J. Immunol Meth. 227(1-2):53-63, 1999).

[0732] In some embodiments, immune effector cells (such as PBMCs or T cells) are expanded and stimulated by contacting the cells to one or both of an anti-CD3 antibody and IL-2. In embodiments, the cells are expanded without anti-CD3 or anti-CD28 beads.

[0733] In certain aspects, the primary stimulatory signal and the costimulatory signal for the T cell may be provided by different protocols. For example, the agents providing each signal may be in solution or coupled to a surface. When coupled to a surface, the agents may be coupled to the same surface (i.e., in “cis” formation) or to separate surfaces (i.e., in “trans” formation). Alternatively, one agent may be coupled to a surface and the other agent in solution. In one aspect, the agent providing the costimulatory signal is bound to a cell surface and the agent providing the primary activation signal is in solution or coupled to a surface. In certain aspects, both agents can be in solution. In one aspect, the agents may be in soluble form, and then cross-linked to a surface, such as a cell expressing Fc receptors or an antibody or other binding agent which will bind to the agents. In this regard, see for example, U.S. Patent Application Publication Nos. 20040101519 and 20060034810 for artificial antigen presenting cells (aAPCs) that are contemplated for use in activating and expanding T cells in the present invention.

[0734] In one aspect, the two agents are immobilized on beads, either on the same bead, i.e., “cis,” or to separate beads, i.e., “trans.” By way of example, the agent providing the primary activation signal is an anti-CD3 antibody or an antigen-binding fragment thereof and the agent providing the costimulatory signal is an anti-CD28 antibody or antigen-binding fragment thereof; and both agents are co-immobilized to the same bead in equivalent molecular amounts. In one aspect, a 1:1 ratio of each antibody bound to the beads for CD4+ T cell expansion and T cell growth is used. In certain aspects, a ratio of anti CD3:CD28 antibodies bound to the beads is used such that an increase in T cell expansion is observed as compared to the expansion observed using a ratio of 1:1. In one particular aspect an increase of from about 1 to about 3 fold is observed as compared to the expansion observed using a ratio of 1:1. In one aspect, the ratio of CD3:CD28 antibody bound to the beads ranges from 100:1 to 1:100 and all integer values there between. In one aspect, more anti-CD28 antibody is bound to the particles than anti-CD3 antibody, i.e., the ratio of CD3:CD28 is less than one. In certain aspects, the ratio of anti CD28 antibody to anti CD3 antibody bound to the beads is greater than 2:1. In one particular aspect, a 1:100 CD3:CD28 ratio of antibody bound to beads is used. In one aspect, a 1:75 CD3:CD28 ratio of antibody bound to beads is used. In a further aspect, a 1:50 CD3:CD28 ratio of antibody bound to beads is used. In one aspect, a 1:30 CD3:CD28 ratio of antibody bound to beads is used. In one aspect, a 1:10 CD3:CD28 ratio of antibody bound to beads is used. In one aspect, a 1:3 CD3:CD28 ratio of antibody bound to the beads is used. In yet one aspect, a 3:1 CD3:CD28 ratio of antibody bound to the beads is used.

[0735] Ratios of particles to cells from 1:500 to 500:1 and any integer values in between may be used to stimulate T cells or other target cells. As those of ordinary skill in the art can readily appreciate, the ratio of particles to cells may depend on particle size relative to the target cell. For example, small sized beads could only bind a few cells, while larger beads could bind many. In certain aspects the ratio of cells to particles ranges from 1:100 to 100:1 and any integer values in-between and in further aspects the ratio comprises 1:9 to 9:1 and any integer values in between, can also be used to stimulate T cells. The ratio of anti-CD3- and anti-CD28-coupled particles to T cells that result in T cell stimulation can vary as noted above, however certain suitable values include 1:100, 1:50, 1:40, 1:30, 1:20, 1:10, 1:9, 1:8, 1:7, 1:6, 1:5, 1:4, 1:3, 1:2, 1:1, 2:1, 3:1, 4:1, 5:1, 6:1, 7:1, 8:1, 9:1, 10:1, and 15:1 with one suitable ratio being at least 1:1 particles per T cell. In one aspect, a ratio of particles to cells of 1:1 or less is used. In one particular aspect, a suitable particle: cell ratio is 1:5. In further aspects, the ratio of particles to cells can be varied depending on the day of stimulation. For example, in one aspect, the ratio of particles to cells is from 1:1 to 10:1 on the first day and additional particles are added to the cells every day or every other day thereafter for up to 10 days, at final ratios of from 1:1 to 1:10 (based on cell counts on the day of addition). In one particular aspect, the ratio of particles to cells is 1:1 on the first day of stimulation and adjusted to 1:5 on the third and fifth days of stimulation. In one aspect, particles are added on a daily or every other day basis to a final ratio of 1:1 on the first day, and 1:5 on the third and fifth days of stimulation. In one aspect, the ratio of particles to cells is 2:1 on the first day of stimulation and adjusted to 1:10 on the third and fifth days of stimulation. In one aspect, particles are added on a daily or every other day basis to a final ratio of 1:1 on the first day, and 1:10 on the third and fifth days of stimulation. One of skill in the art will appreciate that a variety of other ratios may be suitable for use in the present invention. In particular, ratios will vary depending on particle size and on cell size and type. In one aspect, the most typical ratios for use are in the neighborhood of 1:1, 2:1 and 3:1 on the first day.

[0736] In further aspects of the present invention, the cells, such as T cells, are combined with agent-coated beads, the beads and the cells are subsequently separated, and then the cells are cultured. In an alternative aspect, prior to culture, the agent-coated beads and cells are not separated but are cultured together. In a further aspect, the beads and cells are first concentrated by application of a force, such as a magnetic force, resulting in increased ligation of cell surface markers, thereby inducing cell stimulation.

[0737] By way of example, cell surface proteins may be ligated by allowing paramagnetic beads to which anti-CD3 and anti-CD28 are attached (3×28 beads) to contact the T cells. In one aspect the cells (for example, 10⁴ to 10⁹ T cells) and beads (for example, DYNABEADS® M-450 CD3/CD28 T paramagnetic beads at a ratio of 1:1) are combined in a buffer, for example PBS (without divalent cations such as, calcium and magnesium). Again, those of ordinary skill in the art can readily appreciate any cell concentration may be used. For example, the target cell may be very rare in the sample and comprise only 0.01% of the sample or the entire sample (i.e., 100%) may comprise the target cell of interest. Accordingly, any cell number is within the context of the present invention. In certain aspects, it may be desirable to significantly decrease the volume in which particles and cells are mixed together (i.e., increase the concentration of cells), to ensure maximum contact of cells and particles. For example, in one aspect, a concentration of about 10 billion cells/ml, 9 billion/ml, 8 billion/ml, 7 billion/ml, 6 billion/ml, or 5 billion/ml or 2 billion cells/ml is used. In one aspect, greater than 100 million cells/ml is used. In a further aspect, a concentration of cells of 10, 15, 20, 25, 30, 35, 40, 45, or 50 million cells/ml is used. In yet one aspect, a concentration of cells from 75, 80, 85, 90, 95, or 100 million cells/ml is used. In further aspects, concentrations of 125 or 150 million cells/ml can be used. Using high concentrations can result in increased cell yield, cell activation, and cell expansion. Further, use of high cell concentrations allows more efficient capture of cells that may weakly express target antigens of interest, such as CD28-negative T cells. Such populations of cells may have therapeutic value and would be desirable to obtain in certain aspects. For example, using high concentration of cells allows more efficient selection of CD8+ T cells that normally have weaker CD28 expression.

[0738] In one embodiment, cells transduced with a nucleic acid encoding a CAR, e.g., a CAR described herein, are expanded, e.g., by a method described herein. In one embodiment, the cells are expanded in culture for a period of several hours (e.g., about 2, 3, 4, 5, 6, 7, 8, 9, 10, 15, 18, 21 hours) to about 14 days (e.g., 1, 2, 3, 4, 5, 6, 7, 8, 9, 10, 11, 12, 13 or 14 days). In one embodiment, the cells are expanded for a period of 4 to 9 days. In one embodiment, the cells are expanded for a period of 8 days or less, e.g., 7, 6 or 5 days. In one embodiment, the cells, e.g., a CAR cell described herein, are expanded in culture for 5 days, and the resulting cells are more potent than the same cells expanded in culture for 9 days under the same culture conditions. Potency can be defined, e.g., by various T cell functions, e.g. proliferation, target cell killing, cytokine production, activation, migration, or combinations thereof. In one embodiment, the cells, e.g., a CD19 CAR cell described herein, expanded for 5 days show at least a one, two, three or four fold increase in cells doublings upon antigen stimulation as compared to the same cells expanded in culture for 9 days under the same culture conditions. In one embodiment, the cells, e.g., the cells expressing a CAR described herein, are expanded in culture for 5 days, and the resulting cells exhibit higher proinflammatory cytokine production, e.g., IFN-γ and/or GM-CSF levels, as compared to the same cells expanded in culture for 9 days under the same culture conditions. In one embodiment, the cells, e.g., a CAR cell described herein, expanded for 5 days show at least a one, two, three, four, five, ten fold or more increase in pg/ml of proinflammatory cytokine production, e.g., IFN-γ and/or GM-CSF levels, as compared to the same cells expanded in culture for 9 days under the same culture conditions.

[0739] In one aspect of the present invention, the mixture may be cultured for several hours (about 3 hours) to about 14 days or any hourly integer value in between. In one aspect, the mixture may be cultured for 21 days. In one aspect of the invention the beads and the T cells are cultured together for about eight days. In one aspect, the beads and T cells are cultured together for 2-3 days.

[0740] Several cycles of stimulation may also be desired such that culture time of T cells can be 60 days or more. Conditions appropriate for T cell culture include an appropriate media (e.g., Minimal Essential Media or RPMI Media 1640 or, X-vivo 15, (Lonza)) that may contain factors necessary for proliferation and viability, including serum (e.g., fetal bovine or human serum), interleukin-2 (IL-2), insulin, IFN-γ, IL-4, IL-7, GM-CSF, IL-10, IL-12, IL-15, TGFβ, and TNF-α or any other additives for the growth of cells known to the skilled artisan. Other additives for the growth of cells include, but are not limited to, surfactant, plasmanate, and reducing agents such as N-acetyl-cysteine and 2-mercaptoethanol. Media can include RPMI 1640, AIM-V, DMEM, MEM, α-MEM, F-12, X-Vivo 15, and X-Vivo 20, Optimizer, with added amino acids, sodium pyruvate, and vitamins, either serum-free or supplemented with an appropriate amount of serum (or plasma) or a defined set of hormones, and/or an amount of cytokine(s) sufficient for the growth and expansion of T cells. Antibiotics, e.g., penicillin and streptomycin, are included only in experimental cultures, not in cultures of cells that are to be infused into a subject. The target cells are maintained under conditions necessary to support growth, for example, an appropriate temperature (e.g., 37° C.) and atmosphere (e.g., air plus 5% CO₂).

[0741] In one embodiment, the cells are expanded in an appropriate media (e.g., media described herein) that includes one or more interleukin that result in at least a 200-fold (e.g., 200-fold, 250-fold, 300-fold, 350-fold) increase in cells over a 14 day expansion period, e.g., as measured by a method described herein such as flow cytometry. In one embodiment, the cells are expanded in the presence IL-15 and/or IL-7 (e.g., IL-15 and IL-7).

[0742] In some embodiments a CAR-expressing cell described herein (e.g., a T cell such as a CD4+ T cell or a CD8+ T cell) is contacted with a composition comprising a interleukin-15 (IL-15) polypeptide, a interleukin-15 receptor alpha (IL-15Ra) polypeptide, or a combination of both a IL-15 polypeptide and a IL-15Ra polypeptide e.g., hetIL-15, during the manufacturing of the CAR-expressing cell, e.g., ex vivo. In embodiments, a CAR-expressing cell described herein is contacted with a composition comprising a IL-15 polypeptide during the manufacturing of the CAR-expressing cell, e.g., ex vivo. In embodiments, a CAR-expressing cell described herein is contacted with a composition comprising a combination of both a IL-15 polypeptide and a IL-15 Ra polypeptide during the manufacturing of the CAR-expressing cell, e.g., ex vivo. In embodiments, a CAR-expressing cell described herein is contacted with a composition comprising hetIL-15 during the manufacturing of the CAR-expressing cell, e.g., ex vivo.

[0743] In one embodiment the CAR-expressing cell (e.g., a T cell or NK cell) described herein is contacted with a composition comprising hetIL-15 during ex vivo expansion. In an embodiment, the CAR-expressing cell described herein is contacted with a composition comprising an IL-15 polypeptide during ex vivo expansion. In an embodiment, the CAR-expressing cell described herein is contacted with a composition comprising both an IL-15 polypeptide and an IL-15Ra polypeptide during ex vivo expansion. In one embodiment the contacting results in the survival and proliferation of a lymphocyte subpopulation, e.g., CD8+ T cells.

[0744] In an embodiment, the method of making disclosed herein further comprises contacting the population of immune effector cells (e.g., T cells or NK cells) with a nucleic acid encoding a telomerase subunit, e.g., hTERT. The nucleic acid encoding the telomerase subunit can be DNA.

[0745] T cells that have been exposed to varied stimulation times may exhibit different characteristics. For example, typical blood or apheresed peripheral blood mononuclear cell products have a helper T cell population (TH, CD4+) that is greater than the cytotoxic or suppressor T cell population (TC, CD8+). Ex vivo expansion of T cells by stimulating CD3 and CD28 receptors produces a population of T cells that prior to about days 8-9 consists predominately of TH cells, while after about days 8-9, the population of T cells comprises an increasingly greater population of TC cells. Accordingly, depending on the purpose of treatment, infusing a subject with a T cell population comprising predominately of TH cells may be advantageous. Similarly, if an antigen-specific subset of TC cells has been isolated it may be beneficial to expand this subset to a greater degree.

[0746] Further, in addition to CD4 and CD8 markers, other phenotypic markers vary significantly, but in large part, reproducibly during the course of the cell expansion process. Thus, such reproducibility enables the ability to tailor an activated T cell product for specific purposes.

[0747] Once a CAR, e.g., CD19 CAR is constructed, various assays can be used to evaluate the activity of the molecule, such as but not limited to, the ability to expand T cells following antigen stimulation, sustain T cell expansion in the absence of re-stimulation, and anti-cancer activities in appropriate in vitro and animal models. Assays to evaluate the effects of a CAR, e.g., CD19 CAR are described in further detail below.

[0748] Western blot analysis of CAR expression in primary T cells can be used to detect the presence of monomers and dimers, e.g., as described in paragraph 695 of International Application WO2015/142675, filed Mar. 13, 2015, which is herein incorporated by reference in its entirety.

[0749] In vitro expansion of CARP T cells following antigen stimulation can be measured by flow cytometry. For example, a mixture of CD4⁺ and CD8⁺ T cells are stimulated with αCD3/αCD28 beads followed by transduction with lentiviral vectors expressing GFP under the control of the promoters to be analyzed. Exemplary promoters include the CMV IE gene, EF-1α, ubiquitin C, or phosphoglycerokinase (PGK) promoters. GFP fluorescence is evaluated on day 6 of culture in the CD4⁺ and/or CD8⁺ T cell subsets by flow cytometry. See, e.g., Milone et al., Molecular Therapy 17(8): 1453-1464 (2009). Alternatively, a mixture of CD4⁺ and CD8⁺ T cells are stimulated with αCD3/αCD28 coated magnetic beads on day 0, and transduced with CAR on day 1 using a bicistronic lentiviral vector expressing CAR along with eGFP using a 2A ribosomal skipping sequence. Cultures are re-stimulated with either CD19+K562 cells (K562-CD19), wild-type K562 cells (K562 wild type) or K562 cells expressing hCD32 and 4-1BBL in the presence of anti-CD3 and anti-CD28 antibody (K562-BBL-3/28) following washing. Exogenous IL-2 is added to the cultures every other day at 100 IU/ml. GFP⁺ T cells are enumerated by flow cytometry using bead-based counting. See, e.g., Milone et al., Molecular Therapy 17(8): 1453-1464 (2009).

[0750] Sustained CAR⁺ T cell expansion in the absence of re-stimulation can also be measured. See, e.g., Milone et al., Molecular Therapy 17(8): 1453-1464 (2009). Briefly, mean T cell volume (fl) is measured on day 8 of culture using a Coulter Multisizer particle counter, a Nexcelom Cellometer Vision, or Millipore Scepter following stimulation with αCD3/αCD28 coated magnetic beads on day 0, and transduction with the indicated CAR on day 1.

[0751] Animal models can also be used to measure a CAR-expressing cell activity, e.g., as described in paragraph 698 of International Application WO2015/142675, filed Mar. 13, 2015, which is herein incorporated by reference in its entirety.

[0752] Dose dependent CAR treatment response can be evaluated, e.g., as described in paragraph 699 of International Application WO2015/142675, filed Mar. 13, 2015, which is herein incorporated by reference in its entirety. Assessment of cell proliferation and cytokine production has been previously described, e.g., as described in paragraph 700 of International Application WO2015/142675, filed Mar. 13, 2015, which is herein incorporated by reference in its entirety. Cytotoxicity can be assessed by a standard ⁵¹Cr-release assay, e.g., as described in paragraph 701 of International Application WO2015/142675, filed Mar. 13, 2015, which is herein incorporated by reference in its entirety. Imaging technologies can be used to evaluate specific trafficking and proliferation of CARs in tumor-bearing animal models, e.g., as described in paragraph 702 of International Application WO2015/142675, filed Mar. 13, 2015, which is herein incorporated by reference in its entirety.

[0753] Other assays, including those described in the Example section herein as well as those that are known in the art can also be used to evaluate the CARs described herein.

[0754] Alternatively, or in combination to the methods disclosed herein, methods and compositions for one or more of detection and/or quantification of CAR-expressing cells (e.g., in vitro or in vivo (e.g., clinical monitoring)), immune cell expansion and/or activation, and/or CAR-specific selection, that involve the use of a CAR ligand, are disclosed. In one exemplary embodiment, the CAR ligand is an antibody that binds to the CAR molecule, e.g., binds to the extracellular antigen binding domain of CAR (e.g., an antibody that binds to the antigen binding domain, e.g., an anti-idiotypic antibody; or an antibody that binds to a constant region of the extracellular binding domain). In other embodiments, the CAR ligand is a CAR antigen molecule (e.g., a CAR antigen molecule as described herein).

[0755] In one aspect, a method for detecting and/or quantifying CAR-expressing cells is disclosed. For example, the CAR ligand can be used to detect and/or quantify CAR-expressing cells in vitro or in vivo (e.g., clinical monitoring of CAR-expressing cells in a patient, or dosing a patient). The method includes:
[0756] providing the CAR ligand (optionally, a labelled CAR ligand, e.g., a CAR ligand that includes a tag, a bead, a radioactive or fluorescent label);
[0757] acquiring the CAR-expressing cell (e.g., acquiring a sample containing CAR-expressing cells, such as a manufacturing sample or a clinical sample);
[0758] contacting the CAR-expressing cell with the CAR ligand under conditions where binding occurs, thereby detecting the level (e.g., amount) of the CAR-expressing cells present. Binding of the CAR-expressing cell with the CAR ligand can be detected using standard techniques such as FACS, ELISA and the like.

[0759] In another aspect, a method of expanding and/or activating cells (e.g., immune effector cells) is disclosed. The method includes:
[0760] providing a CAR-expressing cell (e.g., a first CAR-expressing cell or a transiently expressing CAR cell);
[0761] contacting said CAR-expressing cell with a CAR ligand, e.g., a CAR ligand as described herein), under conditions where immune cell expansion and/or proliferation occurs, thereby producing the activated and/or expanded cell population.

[0762] In certain embodiments, the CAR ligand is present on (e.g., is immobilized or attached to a substrate, e.g., a non-naturally occurring substrate). In some embodiments, the substrate is a non-cellular substrate. The non-cellular substrate can be a solid support chosen from, e.g., a plate (e.g., a microtiter plate), a membrane (e.g., a nitrocellulose membrane), a matrix, a chip or a bead. In embodiments, the CAR ligand is present in the substrate (e.g., on the substrate surface). The CAR ligand can be immobilized, attached, or associated covalently or non-covalently (e.g., cross-linked) to the substrate. In one embodiment, the CAR ligand is attached (e.g., covalently attached) to a bead. In the aforesaid embodiments, the immune cell population can be expanded in vitro or ex vivo. The method can further include culturing the population of immune cells in the presence of the ligand of the CAR molecule, e.g., using any of the methods described herein.

[0763] In other embodiments, the method of expanding and/or activating the cells further comprises addition of a second stimulatory molecule, e.g., CD28. For example, the CAR ligand and the second stimulatory molecule can be immobilized to a substrate, e.g., one or more beads, thereby providing increased cell expansion and/or activation.

[0764] In other embodiments, a method for selecting or enriching for a CAR expressing cell is provided. The method includes contacting the CAR expressing cell with a CAR ligand as described herein; and selecting the cell on the basis of binding of the CAR ligand.

[0765] In yet other embodiments, a method for depleting (e.g., reducing and/or killing) a CAR expressing cell is provided. The method includes contacting the CAR expressing cell with a CAR ligand as described herein; and targeting the cell on the basis of binding of the CAR ligand thereby reducing the number, and/or killing, the CAR-expressing cell. In one embodiment, the CAR ligand is coupled to a toxic agent (e.g., a toxin or a cell ablative drug). In another embodiment, the anti-idiotypic antibody can cause effector cell activity, e.g., ADCC or ADC activities.

[0766] Exemplary anti-CAR antibodies that can be used in the methods disclosed herein are described, e.g., in WO 2014/190273 and by Jena et al., “Chimeric Antigen Receptor (CAR)-Specific Monoclonal Antibody to Detect CD19-Specific T cells in Clinical Trials”, PLOS March 2013 8:3 e57838, the contents of which are incorporated by reference. In some aspects and embodiments, the compositions and methods herein are optimized for a specific subset of T cells, e.g., as described in US Serial No. PCT/US2015/043219 filed Jul. 31, 2015, the contents of which are incorporated herein by reference in their entirety. In some embodiments, the optimized subsets of T cells display an enhanced persistence compared to a control T cell, e.g., a T cell of a different type (e.g., CD8+ or CD4+) expressing the same construct.

[0767] In some embodiments, a CD4+ T cell comprises a CAR described herein, which CAR comprises an intracellular signaling domain suitable for (e.g., optimized for, e.g., leading to enhanced persistence in) a CD4+ T cell, e.g., an ICOS domain. In some embodiments, a CD8+ T cell comprises a CAR described herein, which CAR comprises an intracellular signaling domain suitable for (e.g., optimized for, e.g., leading to enhanced persistence of) a CD8+ T cell, e.g., a 4-1BB domain, a CD28 domain, or another costimulatory domain other than an ICOS domain. In some embodiments, the CAR described herein comprises an antigen binding domain described herein, e.g., a CAR comprising an antigen binding domain.

[0768] In an aspect, described herein is a method of treating a subject, e.g., a subject having cancer. The method includes administering to said subject, an effective amount of:
[0769] 1) a CD4+ T cell comprising a CAR (the CARCD4+) comprising:
[0770] an antigen binding domain, e.g., an antigen binding domain described herein;
[0771] a transmembrane domain; and
[0772] an intracellular signaling domain, e.g., a first costimulatory domain, e.g., an ICOS domain; and
[0773] 2) a CD8+ T cell comprising a CAR (the CARCD8+) comprising:
[0774] an antigen binding domain, e.g., an antigen binding domain described herein;
[0775] a transmembrane domain; and
[0776] an intracellular signaling domain, e.g., a second costimulatory domain, e.g., a 4-1BB domain, a CD28 domain, or another costimulatory domain other than an ICOS domain;
[0777] wherein the CARCD4+ and the CARCD8+ differ from one another.
[0778] Optionally, the method further includes administering:
[0779] 3) a second CD8+ T cell comprising a CAR (the second CARCD8+) comprising:
[0780] an antigen binding domain, e.g., an antigen binding domain described herein;
[0781] a transmembrane domain; and
[0782] an intracellular signaling domain, wherein the second CARCD8+ comprises an intracellular signaling domain, e.g., a costimulatory signaling domain, not present on the CARCD8+, and, optionally, does not comprise an ICOS signaling domain.

### Methods of Manufacture/Production

[0783] In certain aspects, the disclosure provides a method of making a cell, comprising transducing an immune effector cell, e.g., a T cell or NK cell, with a vector as described herein, e.g., a vector encoding a CAR. In certain aspects, the disclosure provides a method of making a cell, comprising introducing a nucleic acid as described herein (e.g., a nucleic acid encoding a CAR) into an immune effector cell, e.g., a T cell or NK cell. In certain aspects, the disclosure provides a method of generating a population of RNA-engineered cells comprising introducing an in vitro transcribed RNA or synthetic RNA into a cell, where the RNA comprises a nucleic acid as described herein, e.g., a nucleic acid encoding a CAR.

[0784] In some embodiments, the methods of making disclosed herein further comprise contacting the population of cells, (e.g., CD19 CAR-expressing cells, CD20 CAR-expressing cells, CD22 CAR-expressing cells, B-cell inhibitor cells, or both of CD19 CAR-expressing cells and B-cell inhibitor cells), with a nucleic acid encoding a telomerase subunit, e.g., hTERT. The nucleic acid encoding the telomerase subunit can be DNA.

[0785] In some embodiments, the method of making disclosed herein further comprises culturing the population of cells, (e.g., a population of CAR-expressing cells, e.g., CD19 CAR-expressing cells), in serum comprising 2% hAB serum.

[0786] In some aspects, the present disclosure provides a method of evaluating suitability for manufacturing, e.g., high or low suitability for manufacturing (e.g., predicting high manufacturing success or low manufacturing success, e.g., manufacturing fail) of a CAR-expressing cell product, e.g., CAR19-expressing cell product sample (e.g., CTL019 or CTL119). The method comprises:
[0787] (1) acquiring a sample comprising immune effector cells (e.g., a whole blood sample, peripheral blood sample, or apheresis sample) from a patient having a cancer, e.g., NHL; and
[0788] (2) evaluating the suitability for manufacturing by determining, from the sample, one, two, three, four, five, six, seven, eight, nine or more (e.g., all) of:
   [0789] (i) complete blood count, e.g., complete blood count with differential;
   [0790] (ii) absolute lymphocyte count (ALC);
   [0791] (iii) absolute monocyte count (AMC);
   [0792] (iv) percent or number of lymphocytes;
   [0793] (v) percent or number of neutrophils;
   [0794] (vi) percent or number of CD3+CD45+ cells;
   [0795] (vii) percent or number of monocytes;
   [0796] (viii) percent or number of CD45 dim or CD45 negative cells;
   [0797] (ix) percent or number of CD15+ and/or CXCR2+ cells; or
   [0798] (x) percent or number of suppressive non-lymphoid cell, e.g., myeloid derived suppressor cells (MDSC);
   [0799] wherein low levels of (i), (ii), (iii), (iv), or (vi) or high levels of (v), (vii), (viii), (ix) or (x) are indicative of low suitability for manufacturing, or
   [0800] wherein high levels of (i), (ii), (iii), (iv), or (vi) or low levels of (v), (vii), (viii), (ix) or (x) are indicative of high suitability for manufacturing,
      thereby evaluating the suitability for manufacturing of the CAR-expressing cell product.

[0801] In some aspects, the present disclosure provides a method of evaluating a sample, or a method of manufacturing CAR-expressing cells, comprising:
[0802] (1) acquiring a sample comprising immune effector cells (e.g., a whole blood sample, peripheral blood sample, or apheresis sample) from a patient having a cancer, e.g., NHL; and
[0803] (2) evaluating one, two, three, four, five, six, seven, eight, nine or more (e.g., all) of:
   [0804] (i) complete blood count, e.g., complete blood count with differential;
   [0805] (ii) absolute lymphocyte count;
   [0806] (iii) absolute monocyte count;
   [0807] (iv) percent or number of lymphocytes;
   [0808] (v) percent or number of neutrophils;
   [0809] (vi) percent or number of CD3+CD45+ cells;
   [0810] (vii) percent or number of monocytes;
   [0811] (viii) percent or number of CD45 dim or CD45 negative cells;
   [0812] (ix) percent or number of CD15+ and/or CXCR2+ cells; or
   [0813] (x) percent or number of suppressive non-lymphoid cell, e.g., myeloid derived suppressor cells (MDSC); and

[0814] (3) optionally contacting the cell sample with a nucleic acid encoding CAR molecule, e.g., a CAR molecule described herein, e.g., a CD19 CAR.

[0815] In embodiments of any of the manufacturing or evaluating aspects herein, low levels of (i), (ii), (iii), (iv), or (vi) or high levels of (v) or (vii), (viii), (ix) or (x) are indicative of low suitability for manufacturing.

[0816] In embodiments of any of the manufacturing or evaluating aspects herein, high levels of (i), (ii), (iii), (iv), or (vi) or low levels of (v), (vii), (viii), (ix) or (x) are indicative of high suitability for manufacturing.

[0817] In embodiments of any of the manufacturing or evaluating aspects herein, the method comprises evaluating two of (i), (ii), (iii), (iv), (v), (vi), (vii), (viii), (ix) or (x). In embodiments, the method comprises evaluating three of (i), (ii), (iii), (iv), (v), (vi), (vii), (viii), (ix) or (x). In embodiments, the method comprises evaluating four of (i), (ii), (iii), (iv), (v), (vi), (vii), (viii), (ix) or (x). In embodiments, the method comprises evaluating five of (i), (ii), (iii), (iv), (v), (vi), (vii), (viii), (ix) or (x). In embodiments, the method comprises evaluating six of (i), (ii), (iii), (iv), (v), (vi), (vii), (viii), (ix) or (x). In embodiments, the method comprises evaluating seven of (i), (ii), (iii), (iv), (v), (vi), (vii), (viii), (ix) or (x). In embodiments, the method comprises evaluating eight of (i), (ii), (iii), (iv), (v), (vi), (vii), (viii), (ix) or (x). In embodiments, the method comprises evaluating nine of (i), (ii), (iii), (iv), (v), (vi), (vii), (viii), (ix) or (x). In embodiments, the method comprises evaluating all of (i), (ii), (iii), (iv), (v), (vi), (vii), (viii), (ix) or (x).

[0818] In embodiments of any of the manufacturing or evaluating aspects herein, wherein the absolute lymphocyte count is greater than or equal to 500/ul, the sample is suitable for manufacturing, e.g., the likelihood of manufacturing success is about 93%. In embodiments, wherein the absolute lymphocyte count is <500/ul, there is a reduced suitability for manufacturing, e.g., the likelihood of manufacturing success is about 65%. In embodiments, wherein the absolute lymphocyte count is <300/ul, there is a reduced suitability for manufacturing, e.g., the likelihood of manufacturing success is about 40%. In embodiments, wherein the absolute monocyte count is <500/ul, there is a reduced suitability for manufacturing. In embodiments, wherein the percent lymphocytes is <10%, there is a reduced suitability for manufacturing. In embodiments, wherein the percent lymphocytes is <40%, there is a reduced suitability for manufacturing. In embodiments, wherein the percent neutrophils is >60%, there is a reduced suitability for manufacturing. In embodiments, wherein the percent CD3+CD45+ cells (e.g., determined by flow cytometry) is <25%, there is a reduced suitability for manufacturing. In embodiments, wherein the percent monocytes is >60%, there is a reduced suitability for manufacturing.

[0819] In embodiments of any of the manufacturing or evaluating aspects herein, a sample with high suitability for manufacturing has an at least 50%, 60%, 70%, 80%, or 90% chance of manufacturing success. In embodiments, a sample with low suitability for manufacturing has less than 50%, 40%, 30%, 20%, or 10% chance of manufacturing success. In embodiment, evaluating the likelihood of manufacturing fail comprises identifying the sample as having at least a 50%, 60%, 70%, 80%, or 90% chance of undergoing manufacturing fail. In embodiment, evaluating the likelihood of manufacturing success comprises identifying the sample as having at least a 50%, 60%, 70%, 80%, or 90% chance of undergoing manufacturing success.

[0820] In embodiments of any of the manufacturing or evaluating aspects herein, e.g., embodiments where the sample has a high suitability for manufacturing, the method further comprises manufacturing one or more CAR-expressing cells from a sample from the subject. In one embodiment, the sample is the same sample that was assayed, and in another embodiment, the sample is a different sample from the subject. In embodiments, the method further comprises contacting a cell sample from the subject with a nucleic acid encoding CAR molecule, e.g., a CAR molecule described herein, e.g., a CD19 CAR. In embodiments the method further comprises freezing and thawing the apheresis sample. In embodiments, the method further comprises determining manufacturing fail or manufacturing success, e.g., based on cell expansion, CAR expression, or transduction efficiency. In embodiments, the method further comprises administering the manufactured cells to the subject.

[0821] In embodiments of any of the manufacturing or evaluating aspects herein, (e.g., embodiments where the sample has a low suitability for manufacturing), the method further comprises performing a second apheresis collection from the subject. In embodiments (e.g., embodiments where the sample has a low suitability for manufacturing) the method further comprises performing an enrichment, e.g., a modified enrichment, on the apheresis sample, e.g., the first or second apheresis sample. In embodiments the method further comprises freezing and thawing the apheresis sample, e.g., the first or second apheresis sample. In embodiments, the method further comprises evaluating T cell enrichment and/or decrease in suppressive non-lymphoid cells, e.g., myeloid derived suppressor cells (MDSC), e.g., after the second apheresis collection, e.g., after the enrichment or freezing and thawing, of the sample. In embodiments, a decrease in the level, e.g., percent or number, of CD45 dim or CD45 negative cells, e.g., relative to a reference sample (e.g., the first apheresis collection) is indicative of high suitability for manufacturing. In other embodiments, a decrease in the level, e.g., percent or number, of CD15-positive and/or CXCR2-positive cells, e.g., relative to a reference sample (e.g., the first apheresis collection) is indicative of high suitability for manufacturing.

[0822] In embodiments, (e.g., embodiments where the sample has a low suitability for manufacturing) the method further comprises discarding the cells in the assayed sample. In embodiments, the method further comprises manufacturing one or more CAR-expressing cells from the second apheresis sample. In embodiments, the first apheresis sample underwent manufacturing fail and the second apheresis sample underwent manufacturing success. In embodiments (e.g., embodiments where the sample has a low suitability for manufacturing), the method further comprises manufacturing one or more CAR-expressing cells from a sample from the subject. In one embodiment, the sample is the same sample that was assayed, and in another embodiment, the sample is a different sample from the subject.

[0823] In embodiments of any of the manufacturing or evaluating aspects herein, the method comprises performing or determining one or more of: complete blood count, flow cytometry phenotyping, cell size, and processing pathway on an apheresis sample.

[0824] In embodiments of any of the manufacturing or evaluating aspects herein, the method can further include performing a small scale test expansion (TE) to evaluate manufacturing proliferative capacity, e.g., one or more of cell number, cell phenotype (e.g., a cell phenotype as described herein), or transduction efficiency. In embodiments wherein the absolute lymphocyte count is <500/ul, the small scale test expansion can be used to evaluate suitability for manufacturing, e.g., high or low suitability for manufacturing. Small scale test expansion can be carried out, e.g., using the experimental conditions described in Example 37. For example, an aliquot of the apheresis sample can be obtained and cultured under small scale conditions similar to large scale manufacturing conditions.

[0825] In embodiments, a complete blood count with differential is a complete blood count that identifies the numbers or percentages of different types of blood cells, e.g., white blood cells, e.g., neutrophils, lymphocytes, monocytes, eosinophils, or basophils, in a sample.

[0826] In another aspect, the invention features a method of evaluating or monitoring the suitability of a sample (e.g., an apheresis sample or a manufactured CAR-expressing cell sample) for a CAR therapy (e.g., a CD19 CAR therapy). The method includes acquiring a value of sample suitability, wherein said value is indicative of the suitability of the CAR-expressing cell sample. In embodiments, the value of sample suitability, comprises a measure of the level or activity of a Stat3 signalling mediator (e.g., IL-6, IL-17, IL-22, IL-31, or CCL20 level or activity) in the CAR-expressing cell, wherein said value is indicative of a subject's responsiveness or relapsing status to the CAR-expressing cell, thereby evaluating the sample suitability.

[0827] In another aspect, the invention features a method of evaluating the suitability of a sample (e.g., an apheresis sample) for a CAR therapy (e.g., a CD19 CAR therapy). The method includes acquiring a value of sample suitability, wherein said value is indicative of the suitability of the CAR-expressing cell sample. In embodiments, the value of the sample suitability, comprises a measure of:
[0828] a) Ki-67 and/or granzyme B level, and
[0829] b) optionally, CD8 level,
[0830] c) optionally, CD45RO level, and/or
[0831] d) optionally, CD27 level,
[0832] wherein a Ki-67 level that is lower than a reference (e.g., lower than that in a CD8+CD45RO+CD27+ cell or population of cells) is indicative that a subject will be a CR or PR_{TD} to the CAR-expressing cell, and/or
[0833] wherein a granzyme B level that is higher than a reference (e.g., lower than that in a CD8+CD45RO+CD27+ cell or population of cells) is indicative that a subject will be a CR or PR_{TD} to the CAR-expressing cell.

[0834] In another aspect, the invention features a method of evaluating the suitability of a sample (e.g., an apheresis sample or a manufactured CAR-expressing cell sample) for a CAR therapy (e.g., a CD19 CAR therapy). The method includes acquiring a value of sample suitability, wherein said value is indicative of the suitability of the CAR-expressing cell therapy.

[0835] In embodiments, the value of sample suitability, comprises a measure of the level or activity of:
[0836] (i) CAR,
[0837] (ii) CD8, and
[0838] (iii) CD27, and/or PD1,
[0839] (e.g., CAR+CD8+CD27+PD1-) immune effector cells, e.g., in a T cell population, in a sample (e.g., an apheresis sample or a manufactured CAR-expressing cell product sample).

[0840] In some aspects, the present disclosure provides a method of evaluating a subject, e.g., evaluating or monitoring the effectiveness of a CAR-expressing cell therapy (e.g., CD19 CAR, (e.g., CTL019 or CTL119)) in a subject, having a cancer, comprising determining the persistence of the CAR-expressing cell in the subject (e.g., using qPCR or flow cytometry), wherein a persistence that is greater than a reference value (e.g., the average persistence in a NR or PD population) indicates a response, e.g., a complete response.

[0841] In embodiments, persistence is calculated by an area under the curve (AUC), e.g., AUC28 or AUC84. In embodiments (e.g., involving ALL), an AUC of above about 5×10⁵ or 1×10⁶ indicates CR. In embodiments (e.g., involving CLL), an AUC of above about 5×10⁵ or 1×10⁶ indicates CR or PR, and/or an AUC of below about 1×10⁵ or 5×10⁴ indicates NR/PD.

[0842] In embodiments, persistence is measured in the peripheral blood or bone marrow.

[0843] In embodiments, the AUC is determined at a preselected time period after administration of the CAR-expressing cell therapy. In some embodiments, the AUC is determined, e.g., between day 0 and day 45, between day 10 and day 40, between day 15 and day 35, between day 20 and day 30, or between day 0 and ending at day 25, 26, 27, 28, 29, or 30, after administration of the CAR-expressing cell therapy. In some embodiments, the AUC is determined, e.g., between day 0 and day 90, between, or between day 0 and ending at day 80, 82, 84, 85, 86, after administration of the CAR-expressing cell therapy.

[0844] In some embodiments, the methods disclosed herein further include administering a T cell depleting agent after treatment with the cell (e.g., an immune effector cell as described herein, e.g., an immune effector cell expressing CAR driven by a truncated PGK1 promoter), thereby reducing (e.g., depleting) the CAR-expressing cells (e.g., the CD19CAR-expressing cells). Such T cell depleting agents can be used to effectively deplete CAR-expressing cells (e.g., CD19CAR-expressing cells) to mitigate toxicity. In some embodiments, the CAR-expressing cells were manufactured according to a method herein, e.g., assayed (e.g., before or after transfection or transduction) according to a method herein.

[0845] In some embodiments, the T cell depleting agent is administered one, two, three, four, or five weeks after administration of the cell, e.g., the population of immune effector cells, described herein.

[0846] In one embodiment, the T cell depleting agent is an agent that depletes CAR-expressing cells, e.g., by inducing antibody dependent cell-mediated cytotoxicity (ADCC) and/or complement-induced cell death. For example, CAR-expressing cells described herein may also express an antigen (e.g., a target antigen) that is recognized by molecules capable of inducing cell death, e.g., ADCC or complement-induced cell death. For example, CAR expressing cells described herein may also express a target protein (e.g., a receptor) capable of being targeted by an antibody or antibody fragment. Examples of such target proteins include, but are not limited to, EpCAM, VEGFR, integrins (e.g., integrins αvβ3, α4, αI3/4β3, α4β7, α5β1, αvβ3, αv), members of the TNF receptor superfamily (e.g., TRAIL-R1, TRAIL-R2), PDGF Receptor, interferon receptor, folate receptor, GPNMB, ICAM-1, HLA-DR, CEA, CA-125, MUC1, TAG-72, IL-6 receptor, 5T4, GD2, GD3, CD2, CD3, CD4, CD5, CD11, CD11a/LFA-1, CD15, CD18/ITGB2, CD19, CD20, CD22, CD23/1gE Receptor, CD25, CD28, CD30, CD33, CD38, CD40, CD41, CD44, CD51, CD52, CD62L, CD74, CD80, CD125, CD147/basigin, CD152/CTLA-4, CD154/CD40L, CD195/CCR5, CD319/SLAMF7, and EGFR, and truncated versions thereof (e.g., versions preserving one or more extracellular epitopes but lacking one or more regions within the cytoplasmic domain).

[0847] In some embodiments, the CAR expressing cell co-expresses the CAR and the target protein, e.g., naturally expresses the target protein or is engineered to express the target protein. For example, the cell, e.g., the population of immune effector cells, can include a nucleic acid (e.g., vector) comprising the CAR nucleic acid (e.g., a CAR nucleic acid as described herein) and a nucleic acid encoding the target protein.

[0848] In one embodiment, the T cell depleting agent is a CD52 inhibitor, e.g., an anti-CD52 antibody molecule, e.g., alemtuzumab.

[0849] In other embodiments, the cell, e.g., the population of immune effector cells, expresses a CAR molecule as described herein (e.g., CD19CAR) and the target protein recognized by the T cell depleting agent. In one embodiment, the target protein is CD20. In embodiments where the target protein is CD20, the T cell depleting agent is an anti-CD20 antibody, e.g., rituximab.

[0850] In further embodiments of any of the aforesaid methods, the methods further include transplanting a cell, e.g., a hematopoietic stem cell, or a bone marrow, into the mammal.

[0851] In another aspect, the invention features a method of conditioning a mammal prior to cell transplantation. The method includes administering to the mammal an effective amount of the cell comprising a CAR nucleic acid or polypeptide, e.g., a CD19 CAR nucleic acid or polypeptide. In some embodiments, the cell transplantation is a stem cell transplantation, e.g., a hematopoietic stem cell transplantation, or a bone marrow transplantation. In other embodiments, conditioning a subject prior to cell transplantation includes reducing the number of target-expressing cells in a subject, e.g., CD19-expressing normal cells or CD19-expressing cancer cells.

### Biopolymer Delivery Methods

[0852] In some embodiments, one or more CAR-expressing cells as disclosed herein can be administered or delivered to the subject via a biopolymer scaffold, e.g., a biopolymer implant. Biopolymer scaffolds can support or enhance the delivery, expansion, and/or dispersion of the CAR-expressing cells described herein. A biopolymer scaffold comprises a biocompatible (e.g., does not substantially induce an inflammatory or immune response) and/or a biodegradable polymer that can be naturally occurring or synthetic. Exemplary biopolymers are described, e.g., in paragraphs 1004-1006 of International Application WO2015/142675, filed Mar. 13, 2015, which is herein incorporated by reference in its entirety.

### Therapeutic Applications

[0853] CD19 Associated Diseases and/or Disorders

[0854] In one aspect, the invention provides methods for treating a disease associated with CD19 expression. In one aspect, the invention provides methods for treating a disease wherein part of the cancer is negative for CD19 and part of the cancer is positive for CD19. For example, the methods and compositions of the invention are useful for treating subjects that have undergone treatment for a disease associated with expression of CD19, wherein the subject that has undergone treatment related to CD19 expression, e.g., treatment with a CD19 CAR, exhibits a disease associated with expression of CD19.

[0855] In one aspect, the invention pertains to a vector comprising CD19 CAR operably linked to promoter for expression in mammalian cells, e.g., T cells or NK cells. In one aspect, the invention provides a recombinant cell, e.g., a T cell or NK cell, expressing the CD19 CAR for use in treating CD19-expressing cancers, wherein the recombinant T cell expressing the CD19 CAR is termed a CD19 CART. In one aspect, the CD19 CART described herein, is capable of contacting a cancer cell with at least one CD19 CAR expressed on its surface such that the CART targets the cancer cell and growth of the cancer is inhibited.

[0856] In one aspect, the invention pertains to a method of inhibiting growth of a CD19-expressing cancer cell, comprising contacting the cancer cell with a CD19 CAR expressing cell, e.g., a CD19 CART cell, described, and one or more other CAR expressing cells, e.g., as described herein, such that the CART is activated in response to the antigen and targets the cancer cell, wherein the growth of the cancer is inhibited. The CD19 CAR-expressing cell, e.g., T cell, is administered in combination with a B-cell inhibitor, e.g., a B-cell inhibitor described herein.

[0857] The invention includes (among other things) a type of cellular therapy where T cells are genetically modified to express a chimeric antigen receptor (CAR) and the CAR T cell is infused to a recipient in need thereof. The infused cell is able to kill tumor cells in the recipient. Unlike antibody therapies, CAR-modified T cells are able to replicate in vivo resulting in long-term persistence that can lead to sustained tumor control. In various aspects, the T cells administered to the patient, or their progeny, persist in the patient for at least four months, five months, six months, seven months, eight months, nine months, ten months, eleven months, twelve months, thirteen months, fourteen month, fifteen months, sixteen months, seventeen months, eighteen months, nineteen months, twenty months, twenty-one months, twenty-two months, twenty-three months, two years, three years, four years, or five years after administration of the T cell to the patient.

[0858] The invention also includes a type of cellular therapy where immune effector cells, e.g., NK cells or T cells are modified, e.g., by in vitro transcribed RNA, to transiently express a chimeric antigen receptor (CAR) and the CAR-expressing (e.g., CAR T) cell is infused to a recipient in need thereof. The infused cell is able to kill cancer cells in the recipient. Thus, in various aspects, the CAR-expressing cells, e.g., T cells, administered to the patient, is present for less than one month, e.g., three weeks, two weeks, one week, after administration of the CAR-expressing cell, e.g., T cell, to the patient.

[0859] Without wishing to be bound by any particular theory, the anti-cancer immunity response elicited by the CAR-modified T cells may be an active or a passive immune response, or alternatively may be due to a direct vs indirect immune response. In one aspect, the CAR (e.g., CD19-CAR) transduced T cells exhibit specific proinflammatory cytokine secretion and potent cytolytic activity in response to human cancer cells expressing the target antigen (e.g., CD19), resist soluble target antigen inhibition, mediate bystander killing and mediate regression of an established human cancer. For example, antigen-less cancer cells within a heterogeneous field of target antigen-expressing cancer may be susceptible to indirect destruction by target antigen-redirected T cells that has previously reacted against adjacent antigen-positive cancer cells.

[0860] In one aspect, the CAR-modified cells of the invention, e.g., fully human CAR T cells, may be a type of vaccine for ex vivo immunization and/or in vivo therapy in a mammal. In one aspect, the mammal is a human.

[0861] With respect to ex vivo immunization, at least one of the following occurs in vitro prior to administering the cell into a mammal: i) expansion of the cells, ii) introducing a nucleic acid encoding a CAR to the cells or iii) cryopreservation of the cells.

[0862] Ex vivo procedures are well known in the art and are discussed more fully below. Briefly, cells are isolated from a mammal (e.g., a human) and genetically modified (i.e., transduced or transfected in vitro) with a vector expressing a CAR disclosed herein. The CAR-modified cell can be administered to a mammalian recipient to provide a therapeutic benefit. The mammalian recipient may be a human and the CAR-modified cell can be autologous with respect to the recipient. Alternatively, the cells can be allogeneic, syngeneic or xenogeneic with respect to the recipient.

[0863] The procedure for ex vivo expansion of hematopoietic stem and progenitor cells is described in U.S. Pat. No. 5,199,942, incorporated herein by reference, can be applied to the cells of the present invention. Other suitable methods are known in the art, therefore the present invention is not limited to any particular method of ex vivo expansion of the cells. Briefly, ex vivo culture and expansion of T cells can comprise: (1) collecting CD34+ hematopoietic stem and progenitor cells from a mammal from peripheral blood harvest or bone marrow explants; and (2) expanding such cells ex vivo. In addition to the cellular growth factors described in U.S. Pat. No. 5,199,942, other factors such as flt3-L, IL-1, IL-3 and c-kit ligand, can be used for culturing and expansion of the cells.

[0864] In addition to using a cell-based vaccine in terms of ex vivo immunization, also included in the methods described herein are compositions and methods for in vivo immunization to elicit an immune response directed against an antigen in a patient.

[0865] Generally, the cells activated and expanded as described herein may be utilized in the treatment and prevention of diseases that arise in individuals who are immunocompromised. In particular, the CAR-expressing cells described herein are used in the treatment of diseases, disorders and conditions associated with expression of one or more B-cell antigen. In certain aspects, the cells are used in the treatment of patients at risk for developing diseases, disorders and conditions associated with expression of one or more B-cell antigen. Thus, the present invention provides (among other things) methods for the treatment or prevention of diseases, disorders and conditions associated with expression of a B-cell antigen comprising administering to a subject in need thereof, a therapeutically effective amount of the CD19 CAR-expressing cells described herein, in combination with one or more of B-cell inhibitor described herein.

[0866] In one embodiment, the therapy described herein (e.g., a CD19 CAR therapy, and the cells expressing a CD19 CAR molecule, e.g., a CD19 CAR molecule described herein) are administered as a first line treatment for the disease, e.g., the cancer, e.g., the cancer described herein. In another embodiment, the therapy described herein (e.g., a CD19 CAR therapy, and the cells expressing a CD19 CAR molecule, e.g., a CD19 CAR molecule described herein) are administered as a second, third, fourth line treatment for the disease, e.g., the cancer, e.g., the cancer described herein.

[0867] The present invention also provides methods for inhibiting the proliferation or reducing a CD19-expressing cell population, the methods comprising contacting a population of cells comprising a CD19-expressing cell with an anti-CD19 CAR-expressing cell described herein that binds to the CD19-expressing cell, and contacting the population of CD19-expressing cells with one or more of a B-cell inhibitor described herein. In a specific aspect, the present invention provides methods for inhibiting the proliferation or reducing the population of cancer cells expressing CD19, the methods comprising contacting the CD19-expressing cancer cell population with an anti-CD19 CAR-expressing cell described herein that binds to the CD19-expressing cell, and contacting the CD19-expressing cell with one or more B-cell described herein. In one aspect, the present invention provides methods for inhibiting the proliferation or reducing the population of cancer cells expressing CD19, the methods comprising contacting the CD19-expressing cancer cell population with an anti-CD19 CAR-expressing cell described herein that binds to the CD19-expressing cell and contacting the CD19-expressing cell with one or more B-cell described herein. In certain aspects, the combination of the anti-CD19 CAR-expressing cell described herein and one or more B-cell described herein reduces the quantity, number, amount or percentage of cells and/or cancer cells by at least 25%, at least 30%, at least 40%, at least 50%, at least 65%, at least 75%, at least 85%, at least 95%, or at least 99% in a subject with or animal model for a hematological cancer or another cancer associated with CD19-expressing cells relative to a negative control. In one aspect, the subject is a human.

[0868] The present invention also provides methods for preventing, treating and/or managing a disease associated with CD19-expressing cells (e.g., a hematologic cancer or atypical cancer expressing CD19), the methods comprising administering to a subject in need an anti-CD19 CAR-expressing cell that binds to the CD19-expressing cell. In one aspect, the subject is a human. Non-limiting examples of disorders associated with CD19-expressing cells include autoimmune disorders (such as lupus), inflammatory disorders (such as allergies and asthma) and cancers (such as hematological cancers or atypical cancers expressing CD19).

[0869] The present invention also provides methods for preventing, treating and/or managing a disease associated with CD19-expressing cells, the methods comprising administering to a subject in need an anti-CD19 CART cell of the invention that binds to the CD19-expressing cell. In one aspect, the subject is a human.

[0870] The present invention also provides methods for preventing relapse of cancer associated with CD19-expressing cells, the methods comprising administering to a subject in need thereof an anti-CD19 CART cell of the invention that binds to the CD19-expressing cell. In one aspect, the methods comprise administering to the subject in need thereof an effective amount of an anti-CD19 CART cell described herein that binds to the CD19-expressing cell in combination with an effective amount of another therapy.

[0871] In one aspect, the invention pertains to a method of treating cancer in a subject. The method comprises administering to the subject a CD19 CAR-expressing cell, e.g., T cell, described herein, such that the cancer is treated in the subject. An example of a cancer that is treatable by the methods described herein is a cancer associated with expression of CD19. In one embodiment, the disease is a solid or liquid tumor. In one embodiment, the disease is a hematologic cancer, e.g., as described herein.

[0872] Non-cancer related indications associated with expression of CD19 include, but are not limited to, e.g., autoimmune disease, (e.g., lupus), inflammatory disorders (allergy and asthma) and transplantation.

[0873] In one aspect, the CAR of the invention can be used to eradicate CD19-expressing normal cells, thereby applicable for use as a cellular conditioning therapy prior to cell transplantation. In one aspect, the CD19-expressing normal cell is a CD19-expressing normal stem cell and the cell transplantation is a stem cell transplantation, e.g., as described herein.

[0874] In some embodiments, a cancer that can be treated with the combination described herein is multiple myeloma. Multiple myeloma is a cancer of the blood, characterized by accumulation of a plasma cell clone in the bone marrow. Current therapies for multiple myeloma include, but are not limited to, treatment with lenalidomide, which is an analog of thalidomide. Lenalidomide has activities which include anti-tumor activity, angiogenesis inhibition, and immunomodulation. In some embodiments, a CD19 CAR, e.g., as described herein, may be used to target myeloma cells. In some embodiments, the combination described herein can be used with one or more additional therapies, e.g., lenalidomide treatment.

[0875] The CAR-expressing cells described herein may be administered either alone, or as a pharmaceutical composition in combination with diluents and/or with other components such as IL-2, IL-15, IL-7, IL-21 or other cytokines or cell populations.

### Hematologic Cancers

[0876] Hematological cancer conditions are the types of cancer such as leukemia, lymphoma and malignant lymphoproliferative conditions that affect blood, bone marrow and the lymphatic system.

[0877] In one embodiment, the hematologic cancer is leukemia. In one embodiment, the cancer is selected from the group consisting of one or more acute leukemias including but not limited to B-cell acute lymphoid leukemia (BALL), T-cell acute lymphoid leukemia (TALL), small lymphocytic leukemia (SLL), acute lymphoid leukemia (ALL); one or more chronic leukemias including but not limited to chronic myelogenous leukemia (CML), chronic lymphocytic leukemia (CLL); additional hematologic cancers or hematologic conditions including, but not limited to mantle cell lymphoma (MCL), B cell prolymphocytic leukemia, blastic plasmacytoid dendritic cell neoplasm, Burkitt's lymphoma, diffuse large B cell lymphoma, follicular lymphoma, hairy cell leukemia, small cell- or a large cell-follicular lymphoma, malignant lymphoproliferative conditions, MALT lymphoma, Marginal zone lymphoma, multiple myeloma, myelodysplasia and myelodysplastic syndrome, non-Hodgkin lymphoma, Hodgkin lymphoma, plasmablastic lymphoma, plasmacytoid dendritic cell neoplasm, Waldenstrom macroglobulinemia, and “preleukemia” which are a diverse collection of hematological conditions united by ineffective production (or dysplasia) of myeloid blood cells. Diseases associated with CD19, CD20, or CD22 expression include, but not limited to atypical and/or non-classical cancers, malignancies, precancerous conditions or proliferative diseases expressing CD19, CD20, or CD22; and any combination thereof.

[0878] Leukemia can be classified as acute leukemia and chronic leukemia. Acute leukemia can be further classified as acute myelogenous leukemia (AML) and acute lymphoid leukemia (ALL). Chronic leukemia includes chronic myelogenous leukemia (CML) and chronic lymphoid leukemia (CLL). Other related conditions include myelodysplastic syndromes (MDS, formerly known as “preleukemia”) which are a diverse collection of hematological conditions united by ineffective production (or dysplasia) of myeloid blood cells and risk of transformation to AML.

[0879] Lymphoma is a group of blood cell tumors that develop from lymphocytes. Exemplary lymphomas include non-Hodgkin lymphoma and Hodgkin lymphoma.

[0880] In an aspect, the invention pertains to a method of treating a mammal having Hodgkin lymphoma, comprising administering to the mammal an effective amount of the cells expressing a CD19 CAR molecule, e.g., a CD19 CAR molecule described herein and a B-cell inhibitor.

[0881] In one aspect, the compositions and CART cells or CAR expressing NK cells of the present invention are particularly useful for treating B cell malignancies, such as non-Hodgkin lymphomas, e.g., DLBCL, Follicular lymphoma, or CLL.

[0882] Non-Hodgkin lymphoma (NHL) is a group of cancers of lymphocytes, formed from either B or T cells. NHLs occur at any age and are often characterized by lymph nodes that are larger than normal, weight loss, and fever. Different types of NHLs are categorized as aggressive (fast-growing) and indolent (slow-growing) types. B-cell non-Hodgkin lymphomas include Burkitt lymphoma, chronic lymphocytic leukemia/small lymphocytic lymphoma (CLL/SLL), diffuse large B-cell lymphoma (DLBCL), follicular lymphoma, immunoblastic large cell lymphoma, precursor B-lymphoblastic lymphoma, and mantle cell lymphoma. Examples of T-cell non-Hodgkin lymphomas include mycosis fungoides, anaplastic large cell lymphoma, and precursor T-lymphoblastic lymphoma. Lymphomas that occur after bone marrow or stem cell transplantation are typically B-cell non-Hodgkin lymphomas. See, e.g., Maloney. NEJM. 366.21(2012):2008-16.

[0883] Diffuse large B-cell lymphoma (DLBCL) is a form of NHL that develops from B cells. DLBCL is an aggressive lymphoma that can arise in lymph nodes or outside of the lymphatic system, e.g., in the gastrointestinal tract, testes, thyroid, skin, breast, bone, or brain. Three variants of cellular morphology are commonly observed in DLBCL: centroblastic, immunoblastic, and anaplastic. Centroblastic morphology is most common and has the appearance of medium-to-large-sized lymphocytes with minimal cytoplasm. There are several subtypes of DLBCL. For example, primary central nervous system lymphoma is a type of DLBCL that only affects the brain is called and is treated differently than DLBCL that affects areas outside of the brain. Another type of DLBCL is primary mediastinal B-cell lymphoma, which often occurs in younger patients and grows rapidly in the chest. Symptoms of DLBCL include a painless rapid swelling in the neck, armpit, or groin, which is caused by enlarged lymph nodes. For some subjects, the swelling may be painful. Other symptoms of DLBCL include night sweats, unexplained fevers, and weight loss. Although most patients with DLBCL are adults, this disease sometimes occurs in children. Treatment for DLBCL includes chemotherapy (e.g., cyclophosphamide, doxorubicin, vincristine, prednisone, etoposide), antibodies (e.g., Rituxan), radiation, or stem cell transplants.

[0884] Follicular lymphoma a type of non-Hodgkin lymphoma and is a lymphoma of follicle center B-cells (centrocytes and centroblasts), which has at least a partially follicular pattern. Follicular lymphoma cells express the B-cell markers CD10, CD19, CD20, and CD22. Follicular lymphoma cells are commonly negative for CD5. Morphologically, a follicular lymphoma tumor is made up of follicles containing a mixture of centrocytes (also called cleaved follicle center cells or small cells) and centroblasts (also called large noncleaved follicle center cells or large cells). The follicles are surrounded by non-malignant cells, mostly T-cells. The follicles contain predominantly centrocytes with a minority of centroblasts. The World Health Organization (WHO) morphologically grades the disease as follows: grade 1 (<5 centroblasts per high-power field (hpf); grade 2 (6-15 centroblasts/hpf); grade 3 (>15 centroblasts/hpf). Grade 3 is further subdivided into the following grades: grade 3A (centrocytes still present); grade 3B (the follicles consist almost entirely of centroblasts). Treatment of follicular lymphoma includes chemotherapy, e.g., alkyating agents, nucleoside analogs, anthracycline-containing regimens, e.g., a combination therapy called CHOP—cyclophosphamide, doxorubicin, vincristine, prednisone/prednisolone, antibodies (e.g., rituximab), radioimmunotherapy, and hematopoietic stem cell transplantation.

[0885] CLL is a B-cell malignancy characterized by neoplastic cell proliferation and accumulation in bone morrow, blood, lymph nodes, and the spleen. The median age at time of diagnosis of CLL is about 65 years. Current treatments include chemotherapy, radiation therapy, biological therapy, or bone marrow transplantation. Sometimes symptoms are treated surgically (e.g., splenectomy removal of enlarged spleen) or by radiation therapy (e.g., de-bulking swollen lymph nodes). Chemotherapeutic agents to treat CLL include, e.g., fludarabine, 2-chlorodeoxyadenosine (cladribine), chlorambucil, vincristine, pentostatin, cyclophosphamide, alemtuzumab (Campath-1H), doxorubicin, and prednisone. Biological therapy for CLL includes antibodies, e.g., alemtuzumab, rituximab, and ofatumumab; as well as tyrosine kinase inhibitor therapies. A number of criteria can be used to classify stage of CLL, e.g., the Rai or Binet system. The Rai system describes CLL has having five stages: stage 0 where only lymphocytosis is present; stage I where lymphadenopathy is present; stage II where splenomegaly, lymphadenopathy, or both are present; stage III where anemia, organomegaly, or both are present (progression is defined by weight loss, fatigue, fever, massive organomegaly, and a rapidly increasing lymphocyte count); and stage IV where anemia, thrombocytopenia, organomegaly, or a combination thereof are present. Under the Binet staging system, there are three categories: stage A where lymphocytosis is present and less than three lymph nodes are enlarged (this stage is inclusive of all Rai stage 0 patients, one-half of Rai stage I patients, and one-third of Rai stage II patients); stage B where three or more lymph nodes are involved; and stage C wherein anemia or thrombocytopenia, or both are present. These classification systems can be combined with measurements of mutation of the immunoglobulin genes to provide a more accurate characterization of the state of the disease. The presence of mutated immunoglobulin genes correlates to improved prognosis.

[0886] In another embodiment, the CAR expressing cells of the present invention are used to treat cancers or leukemias, e.g., with leukemia stem cells. For example, the leukemia stem cells are CD34⁺/CD38⁻ leukemia cells.

[0887] In some embodiments, a CAR-expressing cell (e.g., CD19 CAR-expressing cell) described herein is used to deplete a B cell (e.g., a population of B cells, e.g., regulatory B cells). Without wishing to be bound by theory, it is believed that depletion of B cells, e.g., regulatory B cells, can improve the tumor microenvironment such that anti-cancer therapies (e.g., therapies described herein) can be more effective (e.g., than without depletion of the B cells). Thus, provided herein is a method for reducing, e.g., depleting, regulatory cells (e.g., regulatory B cells). The method includes administering a CAR-expressing cell (e.g., CD19 CAR-expressing cell) described herein in an amount sufficient to reduce the regulatory cells. In some embodiments, the methods can be used to modulate a tumor microenvironment, e.g., to enhance the effectiveness of a therapy described herein.

[0888] In some embodiments, a dose of CAR-expressing cells (e.g., CAR-expressing cells described herein, e.g., CD19 CAR-expressing cells described herein) comprises about 10⁴ to about 10⁹ cells/kg, e.g., about 10⁴ to about 10⁵ cells/kg, about 10⁵ to about 10⁶ cells/kg, about 10⁶ to about 10⁷ cells/kg, about 10⁷ to about 10⁸ cells/kg, or about 10⁸ to about 10⁹ cells/kg. In embodiments, the dose of CAR-expressing cells comprises about 0.6×10⁶ cells/kg to about 2×10⁷ cells/kg.

[0889] In some embodiments, a dose of CAR-expressing cells described herein (e.g., CD19 CAR-expressing cells) comprises about 2×10⁵, 1×10⁶, 1.1×10⁶, 2×10⁶, 3×10⁶, 3.6×10⁶, 5×10⁶, 1×10⁷, 1.8×10⁷, 2×10⁷, 5×10⁷, 1×10⁸, 2×10⁸, 3×10⁸, or 5×10⁸ cells/kg. In some embodiments, a dose of CAR cells (e.g., CD19 CAR-expressing cells) comprises at least about 1×10⁶, 1.1×10⁶, 2×10⁶, 3.6×10⁶, 5×10⁶, 1×10⁷, 1.8×10⁷, 2×10⁷, 5×10⁷, 1×10⁸, 2×10⁸, 3×10⁸, or 5×10⁸ cells/kg. In some embodiments, a dose of CAR cells (e.g., CD19 CAR-expressing cells) comprises up to about 1×10⁶, 1.1×10⁶, 2×10⁶, 3.6×10⁶, 5×10⁶, 1×10⁷, 1.8×10⁷, 2×10⁷, 5×10⁷, 1×10⁸, 2×10⁸, 3×10⁸, or 5×10⁸ cells/kg. In some embodiments, a dose of CAR cells (e.g., CD19 CAR-expressing cells) comprises about 1.1×10⁶-1.8×10⁷ cells/kg. In some embodiments, a dose of CAR cells (e.g., CD19 CAR-expressing cell) comprises about 1×10⁷, 2×10⁷, 5×10⁷, 1×10⁸, 2×10⁸, 3×10⁸, 5×10⁸, 1×10⁹, 2×10⁹, or 5×10⁹ cells. In some embodiments, a dose of CAR cells (e.g., e.g., CD19 CAR-expressing cells) comprises at least about 1×10⁷, 2×10⁷, 5×10⁷, 1×10⁸, 2×10⁸, 3×10⁸, 5×10⁸, 1×10⁹, 2×10⁹, or 5×10⁹ cells. In some embodiments, a dose of CAR cells (e.g., e.g., CD19 CAR-expressing cells) comprises up to about 1×10⁷, 2×10⁷, 5×10⁷, 1×10⁸, 2×10⁸, 3×10⁸, 5×10⁸, 1×10⁹, 2×10⁹, or 5×10⁹ cells.

[0890] In some embodiments, a dose of CAR cells (e.g., CD19 CAR-expressing cells) comprises up to about 1×10⁷, 1.5×10⁷, 2×10⁷, 2.5×10⁷, 3×10⁷, 3.5×10⁷, 4×10⁷, 5×10⁷, 1×10⁸, 1.5×10⁸, 2×10⁸, 2.5×10⁸, 3×10⁸, 3.5×10⁸, 4×10⁸, 5×10⁸, 1×10⁹, 2×10⁹, or 5×10⁹ cells. In some embodiments, a dose of CAR cells (e.g., CD19 CAR-expressing cell) comprises up to about 1-3×10⁷ to 1-3×10⁸ cells. In some embodiments, the subject is administered about 1-3×10⁷ of CD19 CAR-expressing cells. In other embodiments, the subject is administered about 1-3×10⁸ of CD19 CAR-expressing cells.

[0891] In some embodiments, a dose of CAR-expressing cells (e.g., CAR-expressing cells described herein, e.g., CD19 CAR-expressing cells described herein) comprises about 1×10⁶ cells/m² to about 1×10⁹ cells/m², e.g., about 1×10⁷ cells/m² to about 5×10⁸ cells/m², e.g., about 1.5×10⁷ cells/m², about 2×10⁷ cells/m², about 4.5×10⁷ cells/m², about 10⁸ cells/m², about 1.2×10⁸ cells/m², or about 2×10⁸ cells/m².

### Selected Doses and Dosage Regimens

[0892] Accordingly, in one aspect, the invention pertains to a method of treating a subject (e.g., a mammal) having a cancer, comprising administering immune effector cells comprising a CAR molecule. In one embodiment, the immune effector cells are administered as a single dose, e.g., a single dose as described herein. In other embodiments the immune effector cells are administered as a plurality of doses, e.g., a first dose, a second dose, and optionally a third dose, e.g., as described herein.

[0893] In a related aspect, the invention pertains to a method of treating a subject (e.g., an adult subject) having a cancer (e.g., acute lymphoid leukemia (ALL)), comprising administering to the subject a dose, e.g., a single dose, or a plurality of doses (e.g., a first dose, a second dose, and optionally one or more additional doses), each dose comprising immune effector cells expressing a CAR molecule, e.g., a CD19 CAR molecule, (e.g., a CAR molecule according to residues 22-486 of SEQ ID NO: 58) or a BCMA CAR molecule.

[0894] In yet another aspect, the invention pertains to a use of a single dose, or a plurality of doses (e.g., a first dose, a second dose, and optionally a third dose), of immune effector cells comprising a CAR molecule (e.g., a CD19 CAR molecule, (e.g., a CAR molecule according to residues 22-486 of SEQ ID NO: 58) or a BCMA CAR molecule), for treating a subject (e.g., an adult) having a cancer (e.g., acute lymphoid leukemia (ALL)).

[0895] In certain aspects, the invention features a method of treating a subject (e.g., a pediatric subject) having a cancer (e.g., ALL), comprising administering to the subject immune effector cells expressing a CAR molecule. The method comprises administering one of the following:
[0896] (i) administering a dose of 2-5×10⁶ viable CAR-expressing cells/kg, e.g., transduced viable T cells cells/kg, wherein the subject has a body mass of less than or equal to 50 kg;
[0897] (ii) administering a dose of 1.0-2.5×10⁸ viable CAR-expressing cells, e.g., transduced viable T cells, wherein the subject has a body mass of at least 50 kg;
[0898] (iii) administering a dose of 0.2-5×10⁶ viable CAR-expressing cells/kg, e.g., transduced viable T cells/kg, wherein the subject has a body mass of less than or equal to 50 kg; or
[0899] (iv) administering a dose of 0.1-2.5×10⁸ viable CAR-expressing cells, e.g., transduced viable T cells, wherein the subject has a body mass of at least 50 kg.

[0900] In embodiments, a single dose is administered to the subject, e.g., the pediatric subject. In embodiments, the CAR-expressing cell is a CD19 CAR-expressing cell, e.g., a cell expressing a CD19 CAR of any Tables 2 or 3 herein, e.g., CTL019 or CTL119.

[0901] In embodiments, the doses are administered on sequential days, e.g., the first dose is administered on day 1, the second dose is administered on day 2, and the optional third dose (if administered) is administered on day 3.

[0902] In embodiments, a fourth, fifth, or sixth dose, or more doses, are administered.

[0903] In embodiments, the first dose comprises about 10% of the total dose, the second dose comprises about 30% of the total dose, and the third dose comprises about 60% of the total dose, wherein the aforementioned percentages have a sum of 100%. In embodiments, the first dose comprises about 9-11%, 8-12%, 7-13%, or 5-15% of the total dose. In embodiments, the second dose comprises about 29-31%, 28-32%, 27-33%, 26-34%, 25-35%, 24-36%, 23-37%, 22-38%, 21-39%, or 20-40% of the total dose. In embodiments, the third dose comprises about 55-65%, 50-70%, 45-75%, or 40-80% of the total dose. In embodiments, the total dose refers to the total number of viable CAR-expressing cells administered over the course of 1 week, 2 weeks, 3 weeks, or 4 weeks. In some embodiments wherein two doses are administered, the total dose refers to the sum of the number of viable CAR-expressing cells administered to the subject in the first and second doses. In some embodiments wherein three doses are administered, the total dose refers to the sum of the number of viable CAR-expressing cells administered to the subject in the first, second, and third doses.

[0904] In embodiments, the dose is measured according to the number of viable CAR-expressing cells therein. CAR expression can be measured, e.g., by flow cytometry using an antibody molecule that binds the CAR molecule and a detectable label. Viability can be measured, e.g., by Cellometer.

[0905] In embodiments, the viable CAR-expressing cells are administered in ascending doses. In embodiments, the second dose is larger than the first dose, e.g., larger by 10%, 20%, 30%, or 50%. In embodiments, the second dose is twice, three times, four times, or five times the size of the first dose. In embodiments, the third dose is larger than the second dose, e.g., larger by 10%, 20%, 30%, or 50%. In embodiments, the third dose is twice, three times, four times, or five times the size of the second dose.

[0906] In certain embodiments, the method includes one, two, three, four, five, six, seven or all of a)-h) of the following:
[0907] a) the number of CAR-expressing, viable cells administered in the first dose is no more than ⅓, of the number of CAR-expressing, viable cells administered in the second dose;
[0908] b) the number of CAR-expressing, viable cells administered in the first dose is no more than 1/X, wherein X is 2, 3, 4, 5, 6, 7, 8, 9, 10, 15, 20, 30, 40 or 50, of the total number of CAR-expressing, viable cells administered;
[0909] c) the number of CAR-expressing, viable cells administered in the first dose is no more than 1×10⁷, 2×10⁷, 3×10⁷, 4×10⁷, 5×10⁷, 6×10⁷, 7×10⁷, 8×10⁷, 9×10⁷, 1×10⁸, 2×10⁸, 3×10⁸, 4×10⁸, or 5×10⁸ CAR-expressing, viable cells, and the second dose is greater than the first dose;
[0910] d) the number of CAR-expressing, viable cells administered in the second dose is no more than ½, of the number of CAR-expressing, viable cells administered in the third dose;
[0911] e) the number of CAR-expressing, viable cells administered in the second dose is no more than 1/Y, wherein Y is 2, 3, 4, 5, 6, 7, 8, 9, 10, 15, 20, 30, 40 or 50, of the total number of CAR-expressing, viable cells administered;
[0912] f) the number of CAR-expressing, viable cells administered in the second dose is no more than 1×10⁷, 2×10⁷, 3×10⁷, 4×10⁷, 5×10⁷, 6×10⁷, 7×10⁷, 8×10⁷, 9×10⁷, 1×10⁸, 2×10⁸, 3×10⁸, 4×10⁸, or 5×10⁸ CAR-expressing, viable cells, and the third dose is greater than the second dose;
[0913] h) the dosages and time periods of administration of the first, second, and optionally third doses are selected such that the subject experiences CRS at a level no greater than 4, 3, 2, or 1.

[0914] In embodiments, the total dose is about 5×10⁸ CAR-expressing, viable cells. In embodiments, the total dose is about 5×10⁷-5×10⁸ CAR-expressing, viable cells. In embodiments, the first dose is about 5×10⁷ (e.g., ±10%, 20%, or 30%) CAR-expressing, viable cells, the second dose is about 1.5×10⁸ (e.g., ±10%, 20%, or 30%) CAR-expressing, viable cells, and the third dose is about 3×10⁸ (e.g., ±10%, 20%, or 30%) CAR-expressing, viable cells.

[0915] In embodiments, the method comprises administering, e.g., as a single dose or as a plurality of doses as described herein, a dose of 0.02-5×10⁶ viable CAR-expressing cells/kg, e.g., transduced viable T cells/kg, e.g., a dose of 0.02-5×10⁶, 0.03-5×10⁶, 0.04-5×10⁶, 0.05-5×10⁶, 0.06-5×10⁶, 0.07-5×10⁶, 0.08-5×10⁶, 0.09-5×10⁶, 0.10-5×10⁶, 0.11-5×10⁶, 0.12-5×10⁶, 0.13-5×10⁶, 0.14-5×10⁶, 0.15-5×10⁶, 0.16-5×10⁶, 0.17-5×10⁶, 0.18-5×10⁶, 0.19-5×10⁶, or 0.20-5×10⁶, wherein the subject has a body mass of less than or equal to 50 kg.

[0916] In embodiments, the method comprises administering, e.g., as a single dose or as a plurality of doses as described herein, a dose of 0.2-5×10⁶ viable CAR-expressing cells/kg, e.g., transduced viable T cells/kg, e.g., a dose of 0.2-5×10⁶, 0.3-5×10⁶, 0.4-5×10⁶, 0.5-5×10⁶, 0.6-5×10⁶, 0.7-5×10⁶, 0.8-5×10⁶, 0.9-5×10⁶, 1.0-5×10⁶, 1.1-5×10⁶, 1.2-5×10⁶, 1.3-5×10⁶, 1.4-5×10⁶, 1.5-5×10⁶, 1.6-5×10⁶, 1.7-5×10⁶, 1.8-5×10⁶, 1.9-5×10⁶, or 2-5×10⁶, wherein the subject has a body mass of less than or equal to 50 kg.

[0917] In embodiments, the method comprises administering, e.g., as a single dose or as a plurality of doses as described herein, a dose of 2-50×10⁶ viable CAR-expressing cells/kg, e.g., transduced viable T cells/kg, e.g., a dose of 2-5×10⁶, 2-10×10⁶, 2-15×10⁶, 2-20×10⁶, 2-25×10⁶, 2-30×10⁶, 2-35×10⁶, 2-40×10⁶, 2-45×10⁶, or 2-50×10⁶, wherein the subject has a body mass of less than or equal to 50 kg.

[0918] In embodiments, the method further comprises administering, e.g., as a single dose or as a plurality of doses as described herein, a dose of 0.2-50×10⁶ viable CAR-expressing cells/kg, e.g., transduced viable T cells/kg, e.g., a dose of 0.2-5×10⁶, 0.2-10×10⁶, 0.2-15×10⁶, 0.2-20×10⁶, 0.2-25×10⁶, 0.2-30×10⁶, 0.2-35×10⁶, 0.2-40×10⁶, 0.2-45×10⁶, or 0.2-50×10⁶, wherein the subject has a body mass of less than or equal to 50 kg.

[0919] In embodiments, the method comprises administering, e.g., as a single dose or as a plurality of doses as described herein, a dose of 0.02-50×10⁶ viable CAR-expressing cells/kg, e.g., transduced viable T cells/kg, e.g, a dose of 0.02-50×10⁶, 0.03-45×10⁶, 0.05-40×10⁶, 0.1-35×10⁶, 0.2-30×10⁶, 0.3-25×10⁶, 0.4-20×10⁶, 0.5-15×10⁶, 1-10×10⁶, 2-5×10⁶, wherein the subject has a body mass of less than or equal to 50 kg.

[0920] In embodiments, the method comprises administering, e.g., as a single dose or as a plurality of doses as described herein, a dose of 0.01-2.5×10⁸ viable CAR-expressing cells, e.g., transduced viable T cells, e.g., a dose of 0.01-2.5×10⁸, 0.02-2.5×10⁸, 0.03-2.5×10⁸, 0.04-2.5×10⁸, 0.05-2.5×10⁸, 0.06-2.5×10⁸, 0.07-2.5×10⁸, 0.08-2.5×10⁸, 0.09-2.5×10⁸, or 0.10-2.5×10⁸, wherein the subject has a body mass of at least 50 kg.

[0921] In embodiments, the method comprises administering, e.g., as a single dose or as a plurality of doses as described herein, a dose of 0.1-2.5×10⁸ viable CAR-expressing cells, e.g., transduced viable T cells, e.g., a dose of 0.1-2.5×10⁸, 0.2-2.5×10⁸, 0.3-2.5×10⁸, 0.4-2.5×10⁸, 0.5-2.5×10⁸, 0.6-2.5×10⁸, 0.7-2.5×10⁸, 0.8-2.5×10⁸, 0.9-2.5×10⁸, or 1.0-2.5×10⁸, wherein the subject has a body mass of at least 50 kg.

[0922] In embodiments, the method comprises administering, e.g., as a single dose or as a plurality of doses as described herein, a dose of 1-25×10⁸ viable CAR-expressing cells, e.g., transduced viable T cells/kg, e.g., a dose of 1-2.5×10⁸, 1-5×10⁸, 1-7.5×10⁸, 1-10×10⁸, 1-12.5×10⁸, 1-15×10⁸, 1-17.5×10⁸, 1-20×10⁸, 1-22.5×10⁸, or 1-25×10⁸, wherein the subject has a body mass of at least 50 kg.

[0923] In embodiments, the method comprises administering, e.g., as a single dose or as a plurality of doses as described herein, a dose of 0.1-2.5×10⁸ viable CAR-expressing cells, e.g., transduced viable T cells/kg, e.g., a dose of 0.1-2.5×10⁸, 0.1-5×10⁸, 0.1-7.5×10⁸, 0.1-10×10⁸, 0.1-12.5×10⁸, 0.1-15×10⁸, 0.1-17.5×10⁸, 0.1-20×10⁸, 0.1-22.5×10⁸, or 0.1-25×10⁸, wherein the subject has a body mass of at least 50 kg.

[0924] In embodiments, the method comprises administering, e.g., as a single dose or as a plurality of doses as described herein, a dose of 0.01-25×10⁸ viable CAR-expressing cells, e.g., transduced viable T cells/kg, e.g., a dose of 0.01-25×10⁸, 0.05-22.5×10⁸, 0.1-20×10⁸, 0.2-17.5×10⁸, 0.5-15×10⁸, 0.6-12.5×10⁸, 0.7-10×10⁸, 0.8-7.5×10⁸, 0.9-5×10⁸, or 1-2.5×10⁸, wherein the subject has a body mass of at least 50 kg.

[0925] In any of the methods or compositions for use described herein, in some embodiments, a dose of CAR-expressing cells (e.g., CD19 CAR-expressing cells) comprises about 10⁴ to about 10⁹ cells/kg, e.g., about 10⁴ to about 10⁵ cells/kg, about 10⁵ to about 10⁶ cells/kg, about 10⁶ to about 10⁷ cells/kg, about 10⁷ to about 10⁸ cells/kg, or about 10⁸ to about 10⁹ cells/kg; or at least about one of: 1×10⁷, 1.5×10⁷, 2×10⁷, 2.5×10⁷, 3×10⁷, 3.5×10⁷, 4×10⁷, 5×10⁷, 1×10⁸, 1.5×10⁸, 2×10⁸, 2.5×10⁸, 3×10⁸, 3.5×10⁸, 4×10⁸, 5×10⁸, 1×10⁹, 2×10⁹, or 5×10⁹ cells. In some embodiments, a dose of CAR-expressing cells (e.g., CD19 CAR-expressing cells or BCMA CAR-expressing cells) comprises at least about 1-5×10⁷ to 1-5×10⁸ CAR-expressing cells. In some embodiments, the subject is administered about 1-5×10⁷ CAR-expressing cells (e.g., CD19 CAR-expressing cells or BCMA CAR-expressing cells)). In other embodiments, the subject is administered about 1-5×10⁸ CAR-expressing cells (e.g., CD19 CAR-expressing cells or BCMA CAR-expressing cells)).

[0926] Any of the dose ranges disclosed herein is intended to include the upper and lower endpoint values specified. For example, a dose range of 1-5×10⁷ CAR-expressing cells includes a dose of 1×10⁷ CAR-expressing cells and 5×10⁷ CAR-expressing cells (unless explicitly noted otherwise).

### Combination Therapies

[0927] The combination of a CAR as described herein (e.g., a CD19 CAR-expressing cell described herein) may be used in combination with other known agents and therapies.

[0928] A CAR-expressing cell described herein and/or the at least one additional therapeutic agent can be administered simultaneously, in the same or in separate compositions, or sequentially. For sequential administration, the CAR-expressing cell described herein can be administered first, and the additional agent can be administered second, or the order of administration can be reversed.

[0929] The CAR therapy and/or other therapeutic agents (such as a second CAR therapy), procedures or modalities can be administered during periods of active disorder, or during a period of remission or less active disease. The CAR therapy can be administered before the other treatment, concurrently with the treatment, post-treatment, or during remission of the disorder.

[0930] For instance, in some embodiments, CAR therapy is administered to a subject having a disease associated with CD19 expression, e.g., a cancer. The subject can be assayed for indicators of responsiveness or relapse. In some embodiments, when the subject shows one or more signs of relapse, e.g., a frameshift and/or premature stop codon in CD19, an additional therapy is administered. In embodiments, the additional therapy is a B-cell inhibitor. The CD19 therapy may be continued (for instance, when there are still some CD19-expressing cancer cells detectable in the subject) or may be discontinued (for instance, when a risk-benefit analysis favors discontinuing the therapy).

[0931] When administered in combination, the CAR therapy and the additional agent (e.g., second or third agent), or all, can be administered in an amount or dose that is higher, lower or the same than the amount or dosage of each agent used individually, e.g., as a monotherapy. In certain embodiments, the administered amount or dosage of the CAR therapy, the additional agent (e.g., second or third agent), or all, is lower (e.g., at least 20%, at least 30%, at least 40%, or at least 50%) than the amount or dosage of each agent used individually, e.g., as a monotherapy. In other embodiments, the amount or dosage of the CAR therapy, the additional agent (e.g., second or third agent), or all, that results in a desired effect (e.g., treatment of cancer) is lower (e.g., at least 20%, at least 30%, at least 40%, or at least 50% lower) than the amount or dosage of each agent used individually, e.g., as a monotherapy, required to achieve the same therapeutic effect.

[0932] The one or more therapies described herein can be administered to the subject substantially at the same time or in any order. For instance, a CD19 inhibitor, e.g., a CD19 CAR-expressing cell described herein, and/or optionally the at least one additional therapeutic agent can be administered simultaneously, in the same or in separate compositions, or sequentially. Additional timings of administration, e.g., sequence of administration, are described in pages 4-15 of International Application WO 2016/164731, filed Apr. 8, 2016, which is incorporated by reference in its entirety

[0933] In embodiments, one or more of the therapeutics in the combination therapy is an antibody molecule. Cancer antigens can be targeted with monoclonal antibody therapy. Monoclonal antibody (mAb) therapy has been shown to exert powerful antitumor effects by multiple mechanisms, including complement-dependent cytotoxicity (CDC), antibody-dependent cellular cytotoxicity (ADCC) and direct cell inhibition or apoptosis-inducing effects on tumor cells that over-express the target molecules.

[0934] In further aspects, the combination of the CAR-expressing cell described herein may be used in a treatment regimen in combination with surgery, chemotherapy, radiation, an mTOR pathway inhibitor, immunosuppressive agents, such as cyclosporin, azathioprine, methotrexate, mycophenolate, and FK506, antibodies, or other immunoablative agents such as CAMPATH, anti-CD3 antibodies or other antibody therapies, cytoxin, fludarabine, cyclosporin, FK506, rapamycin, mycophenolic acid, steroids, FR901228, cytokines, and irradiation. peptide vaccine, such as that described in Izumoto et al. 2008 J Neurosurg 108:963-971.

[0935] In one embodiment, the CAR-expressing cell described herein (optionally in combination with a B-cell inhibitor) can be used in combination with a chemotherapeutic agent. Exemplary chemotherapeutic agents include an anthracycline (e.g., doxorubicin (e.g., liposomal doxorubicin)); a vinca alkaloid (e.g., vinblastine, vincristine, vindesine, vinorelbine); an alkylating agent (e.g., cyclophosphamide, decarbazine, melphalan, ifosfamide, temozolomide); an immune cell antibody (e.g., alemtuzamab, gemtuzumab, rituximab, tositumomab); an antimetabolite (including, e.g., folic acid antagonists, pyrimidine analogs, purine analogs and adenosine deaminase inhibitors (e.g., fludarabine)); a TNFR glucocorticoid induced TNFR related protein (GITR) agonist; a proteasome inhibitor (e.g., aclacinomycin A, gliotoxin or bortezomib); an immunomodulator such as thalidomide or a thalidomide derivative (e.g., lenalidomide).

[0936] General Chemotherapeutic agents considered for use in combination therapies include anastrozole (Arimidex®), bicalutamide (Casodex®), bleomycin sulfate (Blenoxane®), busulfan (Myleran®), busulfan injection (Busulfex®), capecitabine (Xeloda®), N4-pentoxycarbonyl-5-deoxy-5-fluorocytidine, carboplatin (Paraplatin®), carmustine (BiCNU®), chlorambucil (Leukeran®), cisplatin (Platinol®), cladribine (Leustatin®), cyclophosphamide (Cytoxan® or Neosar®), cytarabine, cytosine arabinoside (Cytosar-U®), cytarabine liposome injection (DepoCyt®), dacarbazine (DTIC-Dome®), dactinomycin (Actinomycin D, Cosmegan), daunorubicin hydrochloride (Cerubidine®), daunorubicin citrate liposome injection (DaunoXome®), dexamethasone, docetaxel (Taxotere®), doxorubicin hydrochloride (Adriamycin®, Rubex®), etoposide (Vepesid®), fludarabine phosphate (Fludara®), 5-fluorouracil (Adrucil®, Efudex®), flutamide (Eulexin®), tezacitibine, gemcitabine (difluorodeoxycitidine), hydroxyurea (Hydrea®), Idarubicin (Idamycin®), ifosfamide (IFEX®), irinotecan (Camptosar®), L-asparaginase (ELSPAR®), leucovorin calcium, melphalan (Alkeran®), 6-mercaptopurine (Purinethol®), methotrexate (Folex®), mitoxantrone (Novantrone®), mylotarg, paclitaxel (Taxol®), nab-paclitaxel (Abraxane®), phoenix (Yttrium90/MX-DTPA), pentostatin, polifeprosan 20 with carmustine implant (Gliadel®), tamoxifen citrate (Nolvadex®), teniposide (Vumon®), 6-thioguanine, thiotepa, tirapazamine (Tirazone®), topotecan hydrochloride for injection (Hycamptin®), vinblastine (Velban®), vincristine (Oncovin®), and vinorelbine (Navelbine®).

[0937] Treatment with a combination of a chemotherapeutic agent and a cell expressing a CAR molecule described herein can be used to treat a hematologic cancer described herein, e.g., AML. In embodiments, the combination of a chemotherapeutic agent and a CAR-expressing cell is useful for targeting, e.g., killing, cancer stem cells, e.g., leukemic stem cells, e.g., in subjects with AML. In embodiments, the combination of a chemotherapeutic agent and a CAR-expressing cell is useful for treating minimal residual disease (MRD). MRD refers to the small number of cancer cells that remain in a subject during treatment, e.g., chemotherapy, or after treatment. MRD is often a major cause for relapse. The present invention provides a method for treating cancer, e.g., MRD, comprising administering a chemotherapeutic agent in combination with a CAR-expressing cell, e.g., as described herein.

[0938] In an embodiment, the chemotherapeutic agent is administered prior to administration of the cell expressing a CAR molecule, e.g., a CAR molecule described herein. In chemotherapeutic regimens where more than one administration of the chemotherapeutic agent is desired, the chemotherapeutic regimen is initiated or completed prior to administration of a cell expressing a CAR molecule, e.g., a CAR molecule described herein. In embodiments, the chemotherapeutic agent is administered at least 1 day, 2 days, 3 days, 4 days, 5 days, 6 days, 7 days, 8 days, 9 days, 10 days, 11 days, 12 days, 13 days, 14 days, 15 days, 20 days, 25 days, or 30 days prior to administration of the cell expressing the CAR molecule. In embodiments, the chemotherapeutic regimen is initiated or completed at least 1 day, 2 days, 3 days, 4 days, 5 days, 6 days, 7 days, 8 days, 9 days, 10 days, 11 days, 12 days, 13 days, 14 days, 15 days, 20 days, 25 days, or 30 days prior to administration of the cell expressing the CAR molecule.

[0939] Anti-cancer agents of particular interest for combinations with the compounds of the present invention include: antimetabolites; drugs that inhibit either the calcium dependent phosphatase calcineurin or the p70S6 kinase FK506) or inhibit the p70S6 kinase; alkylating agents; mTOR inhibitors; immunomodulators; anthracyclines; vinca alkaloids; proteosome inhibitors; GITR agonists; protein tyrosine phosphatase inhibitors; a CDK4 kinase inhibitor; a BTK kinase inhibitor; a MKN kinase inhibitor; a DGK kinase inhibitor; or an oncolytic virus.

[0940] Exemplary antimetabolites include, without limitation, folic acid antagonists (also referred to herein as antifolates), pyrimidine analogs, purine analogs and adenosine deaminase inhibitors): methotrexate (Rheumatrex®, Trexall®), 5-fluorouracil (Adrucil®, Efudex®, Fluoroplex®), floxuridine (FUDF®), cytarabine (Cytosar-U®, Tarabine PFS), 6-mercaptopurine (Puri-Nethol®)), 6-thioguanine (Thioguanine Tabloid®), fludarabine phosphate (Fludara®), pentostatin (Nipent®), pemetrexed (Alimta®), raltitrexed (Tomudex®), cladribine (Leustatin®), clofarabine (Clofarex®, Clolar®), mercaptopurine (Puri-Nethol®), capecitabine (Xeloda®), nelarabine (Arranon®), azacitidine (Vidaza®) and gemcitabine (Gemzar®). Preferred antimetabolites include, e.g., 5-fluorouracil (Adrucil®, Efudex®, Fluoroplex®), floxuridine (FUDF®), capecitabine (Xeloda®), pemetrexed (Alimta®), raltitrexed (Tomudex®) and gemcitabine (Gemzar®).

[0941] Exemplary alkylating agents include, without limitation, nitrogen mustards, ethylenimine derivatives, alkyl sulfonates, nitrosoureas and triazenes): uracil mustard (Aminouracil Mustard®, Chlorethaminacil®, Demethyldopan®, Desmethyldopan®, Haemanthamine®, Nordopan®, Uracil nitrogen Mustard®, Uracillost®, Uracilmostaza®, Uramustin®, Uramustine®), chlormethine (Mustargen®), cyclophosphamide (Cytoxan®, Neosar®, Clafen®, Endoxan®, Procytox®, Revimmune™), ifosfamide (Mitoxana®), melphalan (Alkeran®), Chlorambucil (Leukeran®), pipobroman (Amedel®, Vercyte®), triethylenemelamine (Hemel®, Hexalen®, Hexastat®), triethylenethiophosphoramine, Temozolomide (Temodar®), thiotepa (Thioplex®), busulfan (Busilvex®, Myleran®), carmustine (BiCNU®), lomustine (CeeNU®), streptozocin (Zanosar®), and Dacarbazine (DTIC-Dome®). Additional exemplary alkylating agents include, without limitation, Oxaliplatin (Eloxatin®); Temozolomide (Temodar® and Temodal®); Dactinomycin (also known as actinomycin-D, Cosmegen®); Melphalan (also known as L-PAM, L-sarcolysin, and phenylalanine mustard, Alkeran®); Altretamine (also known as hexamethylmelamine (HMM), Hexalen®); Carmustine (BiCNU®); Bendamustine (Treanda®); Busulfan (Busulfex® and Myleran®); Carboplatin (Paraplatin®); Lomustine (also known as CCNU, CeeNU®); Cisplatin (also known as CDDP, Platinol® and Platinol®-AQ); Chlorambucil (Leukeran®); Cyclophosphamide (Cytoxan® and Neosar®); Dacarbazine (also known as DTIC, DIC and imidazole carboxamide, DTIC-Dome®); Altretamine (also known as hexamethylmelamine (HMM), Hexalen®); Ifosfamide (Ifex®); Prednumustine; Procarbazine (Matulane®); Mechlorethamine (also known as nitrogen mustard, mustine and mechloroethamine hydrochloride, Mustargen®); Streptozocin (Zanosar®); Thiotepa (also known as thiophosphoamide, TESPA and TSPA, Thioplex®); Cyclophosphamide (Endoxan®, Cytoxan®, Neosar®, Procytox®, Revimmune®); and Bendamustine HCl (Treanda®).

[0942] In embodiments, a CAR-expressing cell described herein is administered to a subject in combination with fludarabine, cyclophosphamide, and/or rituximab. In embodiments, a CAR-expressing cell described herein is administered to a subject in combination with fludarabine, cyclophosphamide, and rituximab (FCR). In embodiments, the subject has CLL. For example, the subject has a deletion in the short arm of chromosome 17 (del(17p), e.g., in a leukemic cell). In other examples, the subject does not have a del(17p). In embodiments, the subject comprises a leukemic cell comprising a mutation in the immunoglobulin heavy-chain variable-region (IgV_{H}) gene. In other embodiments, the subject does not comprise a leukemic cell comprising a mutation in the immunoglobulin heavy-chain variable-region (IgV_{H}) gene. In embodiments, the fludarabine is administered at a dosage of about 10-50 mg/m² (e.g., about 10-15, 15-20, 20-25, 25-30, 30-35, 35-40, 40-45, or 45-50 mg/m²), e.g., intravenously. In embodiments, the cyclophosphamide is administered at a dosage of about 200-300 mg/m² (e.g., about 200-225, 225-250, 250-275, or 275-300 mg/m²), e.g., intravenously. In embodiments, the rituximab is administered at a dosage of about 400-600 mg/m2 (e.g., 400-450, 450-500, 500-550, or 550-600 mg/m²), e.g., intravenously.

[0943] In embodiments, a CAR-expressing cell described herein is administered to a subject in combination with bendamustine and rituximab. In embodiments, the subject has CLL. For example, the subject has a deletion in the short arm of chromosome 17 (del(17p), e.g., in a leukemic cell). In other examples, the subject does not have a del(17p). In embodiments, the subject comprises a leukemic cell comprising a mutation in the immunoglobulin heavy-chain variable-region (IgV_{H}) gene. In other embodiments, the subject does not comprise a leukemic cell comprising a mutation in the immunoglobulin heavy-chain variable-region (IgV_{H}) gene. In embodiments, the bendamustine is administered at a dosage of about 70-110 mg/m2 (e.g., 70-80, 80-90, 90-100, or 100-110 mg/m2), e.g., intravenously. In embodiments, the rituximab is administered at a dosage of about 400-600 mg/m2 (e.g., 400-450, 450-500, 500-550, or 550-600 mg/m²), e.g., intravenously.

[0944] In embodiments, a CAR-expressing cell described herein is administered to a subject in combination with rituximab, cyclophosphamide, doxorubicine, vincristine, and/or a corticosteroid (e.g., prednisone). In embodiments, a CAR-expressing cell described herein is administered to a subject in combination with rituximab, cyclophosphamide, doxorubicine, vincristine, and prednisone (R-CHOP). In embodiments, the subject has diffuse large B-cell lymphoma (DLBCL). In embodiments, the subject has nonbulky limited-stage DLBCL (e.g., comprises a tumor having a size/diameter of less than 7 cm). In embodiments, the subject is treated with radiation in combination with the R-CHOP. For example, the subject is administered R-CHOP (e.g., 1-6 cycles, e.g., 1, 2, 3, 4, 5, or 6 cycles of R-CHOP), followed by radiation. In some cases, the subject is administered R-CHOP (e.g., 1-6 cycles, e.g., 1, 2, 3, 4, 5, or 6 cycles of R-CHOP) following radiation.

[0945] In embodiments, a CAR-expressing cell described herein is administered to a subject in combination with etoposide, prednisone, vincristine, cyclophosphamide, doxorubicin, and/or rituximab. In embodiments, a CAR-expressing cell described herein is administered to a subject in combination with etoposide, prednisone, vincristine, cyclophosphamide, doxorubicin, and rituximab (EPOCH-R). In embodiments, a CAR-expressing cell described herein is administered to a subject in combination with dose-adjusted EPOCH-R (DA-EPOCH-R). In embodiments, the subject has a B cell lymphoma, e.g., a Myc-rearranged aggressive B cell lymphoma.

[0946] In embodiments, a CAR-expressing cell described herein is administered to a subject in combination with rituximab and/or lenalidomide. Lenalidomide ((RS)-3-(4-Amino-1-oxo 1,3-dihydro-2H-isoindol-2-yl)piperidine-2,6-dione) is an immunomodulator. In embodiments, a CAR-expressing cell described herein is administered to a subject in combination with rituximab and lenalidomide. In embodiments, the subject has follicular lymphoma (FL) or mantle cell lymphoma (MCL). In embodiments, the subject has FL and has not previously been treated with a cancer therapy. In embodiments, lenalidomide is administered at a dosage of about 10-20 mg (e.g., 10-15 or 15-20 mg), e.g., daily. In embodiments, rituximab is administered at a dosage of about 350-550 mg/m² (e.g., 350-375, 375-400, 400-425, 425-450, 450-475, or 475-500 mg/m²), e.g., intravenously.

[0947] Exemplary mTOR inhibitors include, e.g., temsirolimus; ridaforolimus (formally known as deferolimus, (1R,2R,4S)-4-[(2R)-2 [(1R,9S,12S,15R,16E,18R,19R,21R,23S,24E,26E,28Z,30S,32S,35R)-1,18-dihydroxy-19,30-dimethoxy-15,17,21,23,29,35-hexamethyl-2,3,10,14,20-pentaoxo-11,36-dioxa-4-azatricyclo[30.3.1.0^{4,9}] hexatriaconta-16,24,26,28-tetraen-12-yl]propyl]-2-methoxycyclohexyl dimethylphosphinate, also known as AP23573 and MK8669, and described in PCT Publication No. WO 03/064383); everolimus (Afinitor® or RAD001); rapamycin (AY22989, Sirolimus®); simapimod (CAS 164301-51-3); emsirolimus, (5-{2,4-Bis[(3S)-3-methylmorpholin-4-yl]pyrido[2,3-d]pyrimidin-7-yl}-2-methoxyphenyl)methanol (AZD8055); 2-Amino-8-[trans-4-(2-hydroxyethoxy)cyclohexyl]-6-(6-methoxy-3-pyridinyl)-4-methyl-pyrido[2,3-d]pyrimidin-7(8H)-one (PF04691502, CAS 1013101-36-4); and N²-[1,4-dioxo-4-[[4-(4-oxo-8-phenyl-4H-1-benzopyran-2-yl)morpholinium-4-yl]methoxy]butyl]-L-arginylglycyl-L-α-aspartylL-serine-, inner salt (SF1126, CAS 936487-67-1) (SEQ ID NO: 1316), and XL765.

[0948] Exemplary immunomodulators include, e.g., afutuzumab (available from Roche®); pegfilgrastim (Neulasta®); lenalidomide (CC-5013, Revlimid®); thalidomide (Thalomid®), actimid (CC4047); and IRX-2 (mixture of human cytokines including interleukin 1, interleukin 2, and interferon γ, CAS 951209-71-5, available from IRX Therapeutics).

[0949] Exemplary anthracyclines include, e.g., doxorubicin (Adriamycin® and Rubex®); bleomycin (Lenoxane®); daunorubicin (dauorubicin hydrochloride, daunomycin, and rubidomycin hydrochloride, Cerubidine®); daunorubicin liposomal (daunorubicin citrate liposome, DaunoXome®); mitoxantrone (DHAD, Novantrone®); epirubicin (Ellence™); idarubicin (Idamycin®, Idamycin PFS®); mitomycin C (Mutamycin®); geldanamycin; herbimycin; ravidomycin; and desacetylravidomycin.

[0950] Exemplary vinca alkaloids include, e.g., vinorelbine tartrate (Navelbine®), Vincristine (Oncovin®), and Vindesine (Eldisine®)); vinblastine (also known as vinblastine sulfate, vincaleukoblastine and VLB, Alkaban-AQ® and Velban®); and vinorelbine (Navelbine®).

[0951] Exemplary proteosome inhibitors include bortezomib (Velcade®); carfilzomib (PX-171-007, (S)-4-Methyl-N—((S)-1-(((S)-4-methyl-1-((R)-2-methyloxiran-2-yl)-1-oxopentan-2-yl)amino)-1-oxo-3-phenylpropan-2-yl)-2-((S)-2-(2-morpholinoacetamido)-4-phenylbutanamido)-pentanamide); marizomib (NPI-0052); ixazomib citrate (MLN-9708); delanzomib (CEP-18770); and O-Methyl-N-[(2-methyl-5-thiazolyl)carbonyl]-L-seryl-O-methyl-N-[(1S)-2-[(2R)-2-methyl-2-oxiranyl]-2-oxo-1-(phenylmethyl)ethyl]-L-serinamide (ONX-0912).

[0952] In embodiments, a CAR-expressing cell described herein is administered to a subject in combination with brentuximab. Brentuximab is an antibody-drug conjugate of anti-CD30 antibody and monomethyl auristatin E. In embodiments, the subject has Hodgkin's lymphoma (HL), e.g., relapsed or refractory HL. In embodiments, the subject comprises CD30+HL. In embodiments, the subject has undergone an autologous stem cell transplant (ASCT). In embodiments, the subject has not undergone an ASCT. In embodiments, brentuximab is administered at a dosage of about 1-3 mg/kg (e.g., about 1-1.5, 1.5-2, 2-2.5, or 2.5-3 mg/kg), e.g., intravenously, e.g., every 3 weeks.

[0953] In embodiments, a CAR-expressing cell described herein is administered to a subject in combination with brentuximab and dacarbazine or in combination with brentuximab and bendamustine. Dacarbazine is an alkylating agent with a chemical name of 5-(3,3-Dimethyl-1-triazenyl)imidazole-4-carboxamide. Bendamustine is an alkylating agent with a chemical name of 4-[5-[Bis(2-chloroethyl)amino]-1-methylbenzimidazol-2-yl]butanoic acid. In embodiments, the subject has Hodgkin's lymphoma (HL). In embodiments, the subject has not previously been treated with a cancer therapy. In embodiments, the subject is at least 60 years of age, e.g., 60, 65, 70, 75, 80, 85, or older. In embodiments, dacarbazine is administered at a dosage of about 300-450 mg/m² (e.g., about 300-325, 325-350, 350-375, 375-400, 400-425, or 425-450 mg/m²), e.g., intravenously. In embodiments, bendamustine is administered at a dosage of about 75-125 mg/m2 (e.g., 75-100 or 100-125 mg/m², e.g., about 90 mg/m²), e.g., intravenously. In embodiments, brentuximab is administered at a dosage of about 1-3 mg/kg (e.g., about 1-1.5, 1.5-2, 2-2.5, or 2.5-3 mg/kg), e.g., intravenously, e.g., every 3 weeks.

[0954] In some embodiments, a CAR-expressing cell described herein is administered to a subject in combination with a CD20 inhibitor, e.g., an anti-CD20 antibody (e.g., an anti-CD20 mono- or bispecific antibody) or a fragment thereof. Exemplary anti-CD20 antibodies include but are not limited to rituximab, ofatumumab, ocrelizumab, veltuzumab, obinutuzumab, TRU-015 (Trubion Pharmaceuticals), ocaratuzumab, and Pro131921 (Genentech). See, e.g., Lim et al. Haematologica. 95.1 (2010): 135-43.

[0955] In some embodiments, the anti-CD20 antibody comprises rituximab. Rituximab is a chimeric mouse/human monoclonal antibody IgG1 kappa that binds to CD20 and causes cytolysis of a CD20 expressing cell, e.g., as described in www.accessdata.fda.gov/drugsatfda_docs/label/2010/103705s5311lbl.pdf. In embodiments, a CAR-expressing cell described herein is administered to a subject in combination with rituximab. In embodiments, the subject has CLL or SLL.

[0956] In some embodiments, rituximab is administered intravenously, e.g., as an intravenous infusion. For example, each infusion provides about 500-2000 mg (e.g., about 500-550, 550-600, 600-650, 650-700, 700-750, 750-800, 800-850, 850-900, 900-950, 950-1000, 1000-1100, 1100-1200, 1200-1300, 1300-1400, 1400-1500, 1500-1600, 1600-1700, 1700-1800, 1800-1900, or 1900-2000 mg) of rituximab. In some embodiments, rituximab is administered at a dose of 150 mg/m² to 750 mg/m², e.g., about 150-175 mg/m², 175-200 mg/m², 200-225 mg/m², 225-250 mg/m², 250-300 mg/m², 300-325 mg/m², 325-350 mg/m², 350-375 mg/m², 375-400 mg/m², 400-425 mg/m², 425-450 mg/m², 450-475 mg/m², 475-500 mg/m², 500-525 mg/m², 525-550 mg/m², 550-575 mg/m², 575-600 mg/m², 600-625 mg/m², 625-650 mg/m², 650-675 mg/m², or 675-700 mg/m², where m² indicates the body surface area of the subject. In some embodiments, rituximab is administered at a dosing interval of at least 4 days, e.g., 4, 7, 14, 21, 28, 35 days, or more. For example, rituximab is administered at a dosing interval of at least 0.5 weeks, e.g., 0.5, 1, 2, 3, 4, 5, 6, 7, 8 weeks, or more. In some embodiments, rituximab is administered at a dose and dosing interval described herein for a period of time, e.g., at least 2 weeks, e.g., at least 2, 3, 4, 5, 6, 7, 8, 9, 10, 11, 12, 13, 14, 15, 16, 17, 18, 19, 20 weeks, or greater. For example, rituximab is administered at a dose and dosing interval described herein for a total of at least 4 doses per treatment cycle (e.g., at least 4, 5, 6, 7, 8, 9, 10, 11, 12, 13, 14, 15, 16, or more doses per treatment cycle).

[0957] In some embodiments, the anti-CD20 antibody comprises ofatumumab. Ofatumumab is an anti-CD20 IgG1κ human monoclonal antibody with a molecular weight of approximately 149 kDa. For example, ofatumumab is generated using transgenic mouse and hybridoma technology and is expressed and purified from a recombinant murine cell line (NS0). See, e.g., www.accessdata.fda.gov/drugsatfda_docs/label/2009/125326lbl.pdf; and Clinical Trial Identifier number NCT01363128, NCT01515176, NCT01626352, and NCT01397591. In embodiments, a CAR-expressing cell described herein is administered to a subject in combination with ofatumumab. In embodiments, the subject has CLL or SLL.

[0958] In some embodiments, ofatumumab is administered as an intravenous infusion. For example, each infusion provides about 150-3000 mg (e.g., about 150-200, 200-250, 250-300, 300-350, 350-400, 400-450, 450-500, 500-550, 550-600, 600-650, 650-700, 700-750, 750-800, 800-850, 850-900, 900-950, 950-1000, 1000-1200, 1200-1400, 1400-1600, 1600-1800, 1800-2000, 2000-2200, 2200-2400, 2400-2600, 2600-2800, or 2800-3000 mg) of ofatumumab. In embodiments, ofatumumab is administered at a starting dosage of about 300 mg, followed by 2000 mg, e.g., for about 11 doses, e.g., for 24 weeks. In some embodiments, ofatumumab is administered at a dosing interval of at least 4 days, e.g., 4, 7, 14, 21, 28, 35 days, or more. For example, ofatumumab is administered at a dosing interval of at least 1 week, e.g., 1, 2, 3, 4, 5, 6, 7, 8, 9, 10, 11, 12, 24, 26, 28, 20, 22, 24, 26, 28, 30 weeks, or more. In some embodiments, ofatumumab is administered at a dose and dosing interval described herein for a period of time, e.g., at least 1 week, e.g., 1, 2, 3, 4, 5, 6, 7, 8, 9, 10, 11, 12, 13, 14, 15, 16, 17, 18, 19, 20, 22, 24, 26, 28, 30, 40, 50, 60 weeks or greater, or 1, 2, 3, 4, 5, 6, 7, 8, 9, 10, 11, 12 months or greater, or 1, 2, 3, 4, 5 years or greater. For example, ofatumumab is administered at a dose and dosing interval described herein for a total of at least 2 doses per treatment cycle (e.g., at least 2, 3, 4, 5, 6, 7, 8, 9, 10, 11, 12, 13, 14, 15, 16, 18, 20, or more doses per treatment cycle).

[0959] In some cases, the anti-CD20 antibody comprises ocrelizumab. Ocrelizumab is a humanized anti-CD20 monoclonal antibody, e.g., as described in Clinical Trials Identifier Nos. NCT00077870, NCT01412333, NCT00779220, NCT00673920, NCT01194570, and Kappos et al. Lancet. 19.378(2011):1779-87.

[0960] In some cases, the anti-CD20 antibody comprises veltuzumab. Veltuzumab is a humanized monoclonal antibody against CD20. See, e.g., Clinical Trial Identifier No. NCT00547066, NCT00546793, NCT01101581, and Goldenberg et al. Leuk Lymphoma. 51(5)(2010):747-55.

[0961] In some cases, the anti-CD20 antibody comprises GA101. GA101 (also called obinutuzumab or R05072759) is a humanized and glyco-engineered anti-CD20 monoclonal antibody. See, e.g., Robak. Curr. Opin. Investig. Drugs. 10.6(2009):588-96; Clinical Trial Identifier Numbers: NCT01995669, NCT01889797, NCT02229422, and NCT01414205; and www.accessdata.fda.gov/drugsatfda_docs/label/2013/125486s000lbl.pdf.

[0962] In some cases, the anti-CD20 antibody comprises AME-133v. AME-133v (also called LY2469298 or ocaratuzumab) is a humanized IgG1 monoclonal antibody against CD20 with increased affinity for the FcγRIIIa receptor and an enhanced antibody dependent cellular cytotoxicity (ADCC) activity compared with rituximab. See, e.g., Robak et al. BioDrugs 25.1(2011):13-25; and Forero-Torres et al. Clin Cancer Res. 18.5(2012):1395-403.

[0963] In some cases, the anti-CD20 antibody comprises PRO131921. PRO131921 is a humanized anti-CD20 monoclonal antibody engineered to have better binding to FcγRIIIa and enhanced ADCC compared with rituximab. See, e.g., Robak et al. BioDrugs 25.1(2011):13-25; and Casulo et al. Clin Immunol. 154.1(2014):37-46; and Clinical Trial Identifier No. NCT00452127.

[0964] In some cases, the anti-CD20 antibody comprises TRU-015. TRU-015 is an anti-CD20 fusion protein derived from domains of an antibody against CD20. TRU-015 is smaller than monoclonal antibodies, but retains Fc-mediated effector functions. See, e.g., Robak et al. BioDrugs 25.1(2011):13-25. TRU-015 contains an anti-CD20 single-chain variable fragment (scFv) linked to human IgG1 hinge, CH2, and CH3 domains but lacks CH1 and CL domains.

[0965] In some embodiments, an anti-CD20 antibody described herein is conjugated or otherwise bound to a therapeutic agent, e.g., a chemotherapeutic agent (e.g., cytoxan, fludarabine, histone deacetylase inhibitor, demethylating agent, peptide vaccine, anti-tumor antibiotic, tyrosine kinase inhibitor, alkylating agent, anti-microtubule or anti-mitotic agent), anti-allergic agent, anti-nausea agent (or anti-emetic), pain reliever, or cytoprotective agent described herein.

[0966] In embodiments, a CAR-expressing cell described herein is administered to a subject in combination with a B-cell lymphoma 2 (BCL-2) inhibitor (e.g., venetoclax, also called ABT-199 or GDC-0199) and/or rituximab. In embodiments, a CAR-expressing cell described herein is administered to a subject in combination with venetoclax and rituximab. Venetoclax is a small molecule that inhibits the anti-apoptotic protein, BCL-2. Venetoclax has the following chemical name (4-(4-{[2-(4-chlorophenyl)-4,4-dimethylcyclohex-1-en-1-yl]methyl}piperazin-1-yl)-N-({3-nitro-4-[(tetrahydro-2H-pyran-4-ylmethyl)amino]phenyl}sulfonyl)-2-(1H-pyrrolo[2,3-b]pyridin-5-yloxy)benzamide).

[0967] In embodiments, the subject has CLL. In embodiments, the subject has relapsed CLL, e.g., the subject has previously been administered a cancer therapy. In embodiments, venetoclax is administered at a dosage of about 15-600 mg (e.g., 15-20, 20-50, 50-75, 75-100, 100-200, 200-300, 300-400, 400-500, or 500-600 mg), e.g., daily. In embodiments, rituximab is administered at a dosage of about 350-550 mg/m2 (e.g., 350-375, 375-400, 400-425, 425-450, 450-475, or 475-500 mg/m2), e.g., intravenously, e.g., monthly.

[0968] In some embodiments, one or more CAR-expressing cells described herein is administered in combination with an oncolytic virus. In embodiments, oncolytic viruses are capable of selectively replicating in and triggering the death of or slowing the growth of a cancer cell. In some cases, oncolytic viruses have no effect or a minimal effect on non-cancer cells. An oncolytic virus includes but is not limited to an oncolytic adenovirus, oncolytic Herpes Simplex Viruses, oncolytic retrovirus, oncolytic parvovirus, oncolytic vaccinia virus, oncolytic Sinbis virus, oncolytic influenza virus, or oncolytic RNA virus (e.g., oncolytic reovirus, oncolytic Newcastle Disease Virus (NDV), oncolytic measles virus, or oncolytic vesicular stomatitis virus (VSV)).

[0969] In some embodiments, the oncolytic virus is a virus, e.g., recombinant oncolytic virus, described in US2010/0178684 A1, which is incorporated herein by reference in its entirety. In some embodiments, a recombinant oncolytic virus comprises a nucleic acid sequence (e.g., heterologous nucleic acid sequence) encoding an inhibitor of an immune or inflammatory response, e.g., as described in US2010/0178684 A1, incorporated herein by reference in its entirety. In embodiments, the recombinant oncolytic virus, e.g., oncolytic NDV, comprises a pro-apoptotic protein (e.g., apoptin), a cytokine (e.g., GM-CSF, interferon-gamma, interleukin-2 (IL-2), tumor necrosis factor-alpha), an immunoglobulin (e.g., an antibody against ED-B firbonectin), tumor associated antigen, a bispecific adapter protein (e.g., bispecific antibody or antibody fragment directed against NDV HN protein and a T cell co-stimulatory receptor, such as CD3 or CD28; or fusion protein between human IL-2 and single chain antibody directed against NDV HN protein). See, e.g., Zamarin et al. Future Microbiol. 7.3(2012):347-67, incorporated herein by reference in its entirety. In some embodiments, the oncolytic virus is a chimeric oncolytic NDV described in U.S. Pat. No. 8,591,881 B2, US 2012/0122185 A1, or US 2014/0271677 A1, each of which is incorporated herein by reference in their entireties.

[0970] In some embodiments, the oncolytic virus comprises a conditionally replicative adenovirus (CRAd), which is designed to replicate exclusively in cancer cells. See, e.g., Alemany et al. Nature Biotechnol. 18(2000):723-27. In some embodiments, an oncolytic adenovirus comprises one described in Table 1 on page 725 of Alemany et al., incorporated herein by reference in its entirety.

[0971] Exemplary oncolytic viruses include but are not limited to the following:

[0972] Group B Oncolytic Adenovirus (ColoAd1) (PsiOxus Therapeutics Ltd.) (see, e.g., Clinical Trial Identifier: NCT02053220);

[0973] ONCOS-102 (previously called CGTG-102), which is an adenovirus comprising granulocyte-macrophage colony stimulating factor (GM-CSF) (Oncos Therapeutics) (see, e.g., Clinical Trial Identifier: NCT01598129);

[0974] VCN-01, which is a genetically modified oncolytic human adenovirus encoding human PH20 hyaluronidase (VCN Biosciences, S.L.) (see, e.g., Clinical Trial Identifiers: NCT02045602 and NCT02045589);

[0975] Conditionally Replicative Adenovirus ICOVIR-5, which is a virus derived from wild-type human adenovirus serotype 5 (Had5) that has been modified to selectively replicate in cancer cells with a deregulated retinoblastoma/E2F pathway (Institut Català d'Oncologia) (see, e.g., Clinical Trial Identifier: NCT01864759);

[0976] Celyvir, which comprises bone marrow-derived autologous mesenchymal stem cells (MSCs) infected with ICOVIR5, an oncolytic adenovirus (Hospital Infantil Universitario Niño Jesús, Madrid, Spain/Ramon Alemany) (see, e.g., Clinical Trial Identifier: NCT01844661);

[0977] CG0070, which is a conditionally replicating oncolytic serotype 5 adenovirus (Ad5) in which human E2F-1 promoter drives expression of the essential E1a viral genes, thereby restricting viral replication and cytotoxicity to Rb pathway-defective tumor cells (Cold Genesys, Inc.) (see, e.g., Clinical Trial Identifier: NCT02143804); or

[0978] DNX-2401 (formerly named Delta-24-RGD), which is an adenovirus that has been engineered to replicate selectively in retinoblastoma (Rb)-pathway deficient cells and to infect cells that express certain RGD-binding integrins more efficiently (Clinica Universidad de Navarra, Universidad de Navarra/DNAtrix, Inc.) (see, e.g., Clinical Trial Identifier: NCT01956734).

[0979] In some embodiments, an oncolytic virus described herein is administering by injection, e.g., subcutaneous, intra-arterial, intravenous, intramuscular, intrathecal, or intraperitoneal injection. In embodiments, an oncolytic virus described herein is administered intratumorally, transdermally, transmucosally, orally, intranasally, or via pulmonary administration.

[0980] In an embodiment, cells expressing a CAR described herein are administered to a subject in combination with a molecule that decreases the Treg cell population. Methods that decrease the number of (e.g., deplete) Treg cells are known in the art and include, e.g., CD25 depletion, cyclophosphamide administration, modulating GITR function. Without wishing to be bound by theory, it is believed that reducing the number of Treg cells in a subject prior to apheresis or prior to administration of a CAR-expressing cell described herein reduces the number of unwanted immune cells (e.g., Tregs) in the tumor microenvironment and reduces the subject's risk of relapse.

[0981] In an embodiment, a CAR-expressing cell described herein is administered to a subject in combination with a molecule that decreases the Treg cell population. Methods that decrease the number of (e.g., deplete) Treg cells are known in the art and include, e.g., CD25 depletion, cyclophosphamide administration, and modulating GITR function. Without wishing to be bound by theory, it is believed that reducing the number of Treg cells in a subject prior to apheresis or prior to administration of a CAR-expressing cell described herein reduces the number of unwanted immune cells (e.g., Tregs) in the tumor microenvironment and reduces the subject's risk of relapse. In one embodiment, CAR-expressing cells described herein are administered to a subject in combination with a molecule targeting GITR and/or modulating GITR functions, such as a GITR agonist and/or a GITR antibody that depletes regulatory T cells (Tregs). In one embodiment, CAR-expressing cells described herein are administered to a subject in combination with cyclophosphamide. In one embodiment, the GITR binding molecule and/or molecule modulating GITR function (e.g., GITR agonist and/or Treg depleting GITR antibodies) is administered prior to the CAR-expressing cells. For example, in one embodiment, the GITR agonist can be administered prior to apheresis of the cells. In embodiments, cyclophosphamide is administered to the subject prior to administration (e.g., infusion or re-infusion) of the CAR-expressing cell or prior to apheresis of the cells. In embodiments, cyclophosphamide and an anti-GITR antibody are administered to the subject prior to administration (e.g., infusion or re-infusion) of the CAR-expressing cell or prior to apheresis of the cells. In one embodiment, the subject has cancer (e.g., a solid cancer or a hematological cancer such as ALL or CLL). In one embodiment, the subject has CLL. In embodiments, the subject has a solid cancer, e.g., a solid cancer described herein.

[0982] In one embodiment, the combination of a CD19 CAR expressing cell described herein is administered to a subject in combination with a GITR agonist, e.g., a GITR agonist described herein. In one embodiment, the GITR agonist is administered prior to the CAR-expressing cell, e.g., CD19 CAR-expressing cells. For example, in one embodiment, the GITR agonist can be administered prior to apheresis of the cells. In one embodiment, the subject has CLL.

[0983] In one embodiment, a CAR expressing cell described herein is administered to a subject in combination with a GITR agonist, e.g., a GITR agonist described herein. In one embodiment, the GITR agonist is administered prior to the CAR-expressing cell. For example, in one embodiment, the GITR agonist can be administered prior to apheresis of the cells.

[0984] Exemplary GITR agonists include, e.g., GITR fusion proteins and anti-GITR antibodies (e.g., bivalent anti-GITR antibodies) such as, e.g., a GITR fusion protein described in U.S. Pat. No. 6,111,090, European Patent No.: 090505B1, U.S. Pat. No. 8,586,023, PCT Publication Nos.: WO 2010/003118 and 2011/090754, or an anti-GITR antibody described, e.g., in U.S. Pat. No. 7,025,962, European Patent No.: 1947183B1, U.S. Pat. Nos. 7,812,135, 8,388,967, 8,591,886, European Patent No.: EP 1866339, PCT Publication No.: WO 2011/028683, PCT Publication No.: WO 2013/039954, PCT Publication No.: WO2005/007190, PCT Publication No.: WO 2007/133822, PCT Publication No.: WO2005/055808, PCT Publication No.: WO 99/40196, PCT Publication No.: WO 2001/03720, PCT Publication No.: WO99/20758, PCT Publication No.: WO2006/083289, PCT Publication No.: WO 2005/115451, U.S. Pat. No. 7,618,632, and PCT Publication No.: WO 2011/051726.

[0985] In one embodiment, a CAR expressing cell described herein is administered to a subject in combination with a protein tyrosine phosphatase inhibitor, e.g., a protein tyrosine phosphatase inhibitor described herein. In one embodiment, the protein tyrosine phosphatase inhibitor is an SHP-1 inhibitor, e.g., an SHP-1 inhibitor described herein, such as, e.g., sodium stibogluconate. In one embodiment, the protein tyrosine phosphatase inhibitor is an SHP-2 inhibitor, e.g., an SHP-2 inhibitor described herein.

[0986] In one embodiment, a CAR-expressing cell described herein can be used in combination with a kinase inhibitor. In one embodiment, the kinase inhibitor is a CDK4 inhibitor, e.g., a CDK4 inhibitor described herein, e.g., a CD4/6 inhibitor, such as, e.g., 6-Acetyl-8-cyclopentyl-5-methyl-2-(5-piperazin-1-yl-pyridin-2-ylamino)-8H-pyrido[2,3-d]pyrimidin-7-one, hydrochloride (also referred to as palbociclib or PD0332991). In one embodiment, the kinase inhibitor is a BTK inhibitor, e.g., a BTK inhibitor described herein, such as, e.g., ibrutinib. In one embodiment, the kinase inhibitor is an mTOR inhibitor, e.g., an mTOR inhibitor described herein, such as, e.g., rapamycin, a rapamycin analog, OSI-027. The mTOR inhibitor can be, e.g., an mTORC1 inhibitor and/or an mTORC2 inhibitor, e.g., an mTORC1 inhibitor and/or mTORC2 inhibitor described herein. In one embodiment, the kinase inhibitor is a MNK inhibitor, e.g., a MNK inhibitor described herein, such as, e.g., 4-amino-5-(4-fluoroanilino)-pyrazolo[3,4-d] pyrimidine. The MNK inhibitor can be, e.g., a MNK1a, MNK1b, MNK2a and/or MNK2b inhibitor.

[0987] In one embodiment, the kinase inhibitor is a CDK4 inhibitor selected from aloisine A; flavopiridol or HMR-1275, 2-(2-chlorophenyl)-5,7-dihydroxy-8-[(3S,4R)-3-hydroxy-1-methyl-4-piperidinyl]-4-chromenone; crizotinib (PF-02341066; 2-(2-Chlorophenyl)-5,7-dihydroxy-8-[(2R,3S)-2-(hydroxymethyl)-1-methyl-3-pyrrolidinyl]-4H-1-benzopyran-4-one, hydrochloride (P276-00); 1-methyl-5-[[2-[5-(trifluoromethyl)-1H-imidazol-2-yl]-4-pyridinyl]oxy]-N-[4-(trifluoromethyl)phenyl]-1H-benzimidazol-2-amine (RAF265); indisulam (E7070); roscovitine (CYC202); palbociclib (PD0332991); dinaciclib (SCH727965); N-[5-[[(5-tert-butyloxazol-2-yl)methyl]thio]thiazol-2-yl]piperidine-4-carboxamide (BMS 387032); 4-[[9-chloro-7-(2,6-difluorophenyl)-5H-pyrimido[5,4-d][2]benzazepin-2-yl]amino]-benzoic acid (MLN8054); 5-[3-(4,6-difluoro-1H-benzimidazol-2-yl)-1H-indazol-5-yl]-N-ethyl-4-methyl-3-pyridinemethanamine (AG-024322); 4-(2,6-dichlorobenzoylamino)-1H-pyrazole-3-carboxylic acid N-(piperidin-4-yl)amide (AT7519); 4-[2-methyl-1-(1-methylethyl)-1H-imidazol-5-yl]-N-[4-(methylsulfonyl)phenyl]-2-pyrimidinamine (AZD5438); and XL281 (BMS908662).

[0988] In one embodiment, the kinase inhibitor is a CDK4 inhibitor, e.g., palbociclib (PD0332991), and the palbociclib is administered at a dose of about 50 mg, 60 mg, 70 mg, 75 mg, 80 mg, 90 mg, 100 mg, 105 mg, 110 mg, 115 mg, 120 mg, 125 mg, 130 mg, 135 mg (e.g., 75 mg, 100 mg or 125 mg) daily for a period of time, e.g., daily for 14-21 days of a 28 day cycle, or daily for 7-12 days of a 21 day cycle. In one embodiment, 1, 2, 3, 4, 5, 6, 7, 8, 9, 10, 11, 12 or more cycles of palbociclib are administered.

[0989] In embodiments, a CAR-expressing cell described herein is administered to a subject in combination with a cyclin-dependent kinase (CDK) 4 or 6 inhibitor, e.g., a CDK4 inhibitor or a CDK6 inhibitor described herein. In embodiments, a CAR-expressing cell described herein is administered to a subject in combination with a CDK4/6 inhibitor (e.g., an inhibitor that targets both CDK4 and CDK6), e.g., a CDK4/6 inhibitor described herein. In an embodiment, the subject has MCL. MCL is an aggressive cancer that is poorly responsive to currently available therapies, i.e., essentially incurable. In many cases of MCL, cyclin D1 (a regulator of CDK4/6) is expressed (e.g., due to chromosomal translocation involving immunoglobulin and Cyclin D1 genes) in MCL cells. Thus, without being bound by theory, it is thought that MCL cells are highly sensitive to CDK4/6 inhibition with high specificity (i.e., minimal effect on normal immune cells). CDK4/6 inhibitors alone have had some efficacy in treating MCL, but have only achieved partial remission with a high relapse rate. An exemplary CDK4/6 inhibitor is LEE011 (also called ribociclib).

[0990] Without being bound by theory, it is believed that administration of a CAR-expressing cell described herein with a CDK4/6 inhibitor (e.g., LEE011 or other CDK4/6 inhibitor described herein) can achieve higher responsiveness, e.g., with higher remission rates and/or lower relapse rates, e.g., compared to a CDK4/6 inhibitor alone.

[0991] In one embodiment, the kinase inhibitor is a BTK inhibitor selected from ibrutinib (PCI-32765); GDC-0834; RN-486; CGI-560; CGI-1764; HM-71224; CC-292; ONO-4059; CNX-774; and LFM-A13. In an embodiment, the BTK inhibitor does not reduce or inhibit the kinase activity of interleukin-2-inducible kinase (ITK), and is selected from GDC-0834; RN-486; CGI-560; CGI-1764; HM-71224; CC-292; ONO-4059; CNX-774; and LFM-A13.

[0992] In one embodiment, the kinase inhibitor is a BTK inhibitor, e.g., ibrutinib (PCI-32765). In embodiments, a CAR-expressing cell described herein is administered to a subject in combination with a BTK inhibitor (e.g., ibrutinib). In embodiments, a CAR-expressing cell described herein is administered to a subject in combination with ibrutinib (also called PCI-32765). The chemical name of ibrutinib is (1-[(3R)-3-[4-Amino-3-(4-phenoxyphenyl)-1H-pyrazolo[3,4-d]pyrimidin-1-yl]piperidin-1-yl]prop-2-en-1-one).

[0993] In embodiments, the subject has CLL, mantle cell lymphoma (MCL), or small lymphocytic lymphoma (SLL). For example, the subject has a deletion in the short arm of chromosome 17 (del(17p), e.g., in a leukemic cell). In other examples, the subject does not have a del(17p). In embodiments, the subject has relapsed CLL or SLL, e.g., the subject has previously been administered a cancer therapy (e.g., previously been administered one, two, three, or four prior cancer therapies). In embodiments, the subject has refractory CLL or SLL. In other embodiments, the subject has follicular lymphoma, e.g., relapse or refractory follicular lymphoma. In one embodiment, the kinase inhibitor is a BTK inhibitor, e.g., ibrutinib (PCI-32765), and the ibrutinib is administered at a dose of about 250 mg, 300 mg, 350 mg, 400 mg, 420 mg, 440 mg, 460 mg, 480 mg, 500 mg, 520 mg, 540 mg, 560 mg, 580 mg, 600 mg (e.g., 250 mg, 420 mg or 560 mg) daily for a period of time, e.g., daily for 21 day cycle, or daily for 28 day cycle. In one embodiment, 1, 2, 3, 4, 5, 6, 7, 8, 9, 10, 11, 12 or more cycles of ibrutinib are administered. In some embodiments, ibrutinib is administered in combination with rituximab. See, e.g., Burger et al. (2013) Ibrutinib In Combination With Rituximab (iR) Is Well Tolerated and Induces a High Rate Of Durable Remissions In Patients With High-Risk Chronic Lymphocytic Leukemia (CLL): New, Updated Results Of a Phase II Trial In 40 Patients, Abstract 675 presented at 55^{th} ASH Annual Meeting and Exposition, New Orleans, La. 7-10 December Without being bound by theory, it is thought that the addition of ibrutinib enhances the T cell proliferative response and may shift T cells from a T-helper-2 (Th2) to T-helper-1 (Th1) phenotype. Th1 and Th2 are phenotypes of helper T cells, with Th1 versus Th2 directing different immune response pathways. A Th1 phenotype is associated with proinflammatory responses, e.g., for killing cells, such as intracellular pathogens/viruses or cancerous cells, or perpetuating autoimmune responses. A Th2 phenotype is associated with eosinophil accumulation and anti-inflammatory responses. In some embodiments of the methods, uses, and compositions herein, the BTK inhibitor is a BTK inhibitor described in International Application WO/2015/079417, which is herein incorporated by reference in its entirety. For instance, in some embodiments, the BTK inhibitor is a compound of formula (I) or a pharmaceutically acceptable salt thereof;

[chemical structure]

wherein,
R1 is hydrogen, C1-C6 alkyl optionally substituted by hydroxy;
R2 is hydrogen or halogen;
R3 is hydrogen or halogen;
R4 is hydrogen;
R5 is hydrogen or halogen;
or R4 and R5 are attached to each other and stand for a bond, —CH2-, —CH2-CH2-, —CH═CH—, —CH═CH—CH2-; —CH2-CH═CH—; or —CH2-CH2-CH2-;
R6 and R7 stand independently from each other for H, C1-C6 alkyl optionally substituted by hydroxyl, C3-C6 cycloalkyl optionally substituted by halogen or hydroxy, or halogen;
R8, R9, R, R′, R10 and R11 independently from each other stand for H, or C1-C6 alkyl optionally substituted by C1-C6 alkoxy; or any two of R8, R9, R, R′, R10 and R11 together with the carbon atom to which they are bound may form a 3-6 membered saturated carbocyclic ring;
R12 is hydrogen or C1-C6 alkyl optionally substituted by halogen or C1-C6 alkoxy;
or R12 and any one of R8, R9, R, R′, R10 or R11 together with the atoms to which they are bound may form a 4, 5, 6 or 7 membered azacyclic ring, which ring may optionally be substituted by halogen, cyano, hydroxyl, C1-C6 alkyl or C1-C6 alkoxy;
n is 0 or 1; and
R13 is C2-C6 alkenyl optionally substituted by C1-C6 alkyl, C1-C6 alkoxy or N,N-di-C1-C6 alkyl amino; C2-C6 alkynyl optionally substituted by C1-C6 alkyl or C1-C6 alkoxy; or C2-C6 alkylenyl oxide optionally substituted by C1-C6 alkyl.

[0994] In some embodiments, the BTK inhibitor of Formula I is chosen from: N-(3-(5-((1-Acryloylazetidin-3-yl)oxy)-6-aminopyrimidin-4-yl)-5-fluoro-2-methylphenyl)-4-cyclopropyl-2-fluorobenzamide; (E)-N-(3-(6-Amino-5-((1-(but-2-enoyl)azetidin-3-yl)oxy)pyrimidin-4-yl)-5-fluoro-2-methylphenyl)-4-cyclopropyl-2-fluorobenzamide; N-(3-(6-Amino-5-((1-propioloylazetidin-3-yl)oxy)pyrimidin-4-yl)-5-fluoro-2-methylphenyl)-4-cyclopropyl-2-fluorobenzamide; N-(3-(6-Amino-5-((1-(but-2-ynoyl)azetidin-3-yl)oxy)pyrimidin-4-yl)-5-fluoro-2-methylphenyl)-4-cyclopropyl-2-fluorobenzamide; N-(3-(5-((1-Acryloylpiperidin-4-yl)oxy)-6-aminopyrimidin-4-yl)-5-fluoro-2-methylphenyl)-4-cyclopropyl-2-fluorobenzamide; N-(3-(6-Amino-5-(2-(N-methylacrylamido)ethoxy)pyrimidin-4-yl)-5-fluoro-2-methylphenyl)-4-cyclopropyl-2-fluorobenzamide; (E)-N-(3-(6-Amino-5-(2-(N-methylbut-2-enamido)ethoxy)pyrimidin-4-yl)-5-fluoro-2-methylphenyl)-4-cyclopropyl-2-fluorobenzamide; N-(3-(6-Amino-5-(2-(N-methylpropiolamido)ethoxy)pyrimidin-4-yl)-5-fluoro-2-methylphenyl)-4-cyclopropyl-2-fluorobenzamide; (E)-N-(3-(6-Amino-5-(2-(4-methoxy-N-methylbut-2-enamido)ethoxy)pyrimidin-4-yl)-5-fluoro-2-methylphenyl)-4-cyclopropyl-2-fluorobenzamide; N-(3-(6-Amino-5-(2-(N-methylbut-2-ynamido)ethoxy)pyrimidin-4-yl)-5-fluoro-2-methylphenyl)-4-cyclopropyl-2-fluorobenzamide; N-(2-((4-Amino-6-(3-(4-cyclopropyl-2-fluorobenzamido)-5-fluoro-2-methylphenyl)pyrimidin-5-yl)oxy)ethyl)-N-methyloxirane-2-carboxamide; N-(2-((4-Amino-6-(3-(6-cyclopropyl-8-fluoro-1-oxoisoquinolin-2(1H)-yl)phenyl)pyrimidin-5-yl)oxy)ethyl)-N-methylacrylamide; N-(3-(5-(2-Acrylamidoethoxy)-6-aminopyrimidin-4-yl)-5-fluoro-2-methylphenyl)-4-cyclopropyl-2-fluorobenzamide; N-(3-(6-Amino-5-(2-(N-ethylacrylamido)ethoxy)pyrimidin-4-yl)-5-fluoro-2-methylphenyl)-4-cyclopropyl-2-fluorobenzamide; N-(3-(6-Amino-5-(2-(N-(2-fluoroethyl)acrylamido)ethoxy)pyrimidin-4-yl)-5-fluoro-2-methylphenyl)-4-cyclopropyl-2-fluorobenzamide; N-(3-(5-((1-Acrylamidocyclopropyl)methoxy)-6-aminopyrimidin-4-yl)-5-fluoro-2-methylphenyl)-4-cyclopropyl-2-fluorobenzamide; (S)—N-(3-(5-(2-Acrylamidopropoxy)-6-aminopyrimidin-4-yl)-5-fluoro-2-methylphenyl)-4-cyclopropyl-2-fluorobenzamide; (S)—N-(3-(6-Amino-5-(2-(but-2-ynamido)propoxy)pyrimidin-4-yl)-5-fluoro-2-methylphenyl)-4-cyclopropyl-2-fluorobenzamide; (S)—N-(3-(6-Amino-5-(2-(N-methylacrylamido)propoxy)pyrimidin-4-yl)-5-fluoro-2-methylphenyl)-4-cyclopropyl-2-fluorobenzamide; (S)—N-(3-(6-Amino-5-(2-(N-methylbut-2-ynamido)propoxy)pyrimidin-4-yl)-5-fluoro-2-methylphenyl)-4-cyclopropyl-2-fluorobenzamide; N-(3-(6-Amino-5-(3-(N-methylacrylamido)propoxy)pyrimidin-4-yl)-5-fluoro-2-methylphenyl)-4-cyclopropyl-2-fluorobenzamide; (S)—N-(3-(5-((1-Acryloylpyrrolidin-2-yl)methoxy)-6-aminopyrimidin-4-yl)-5-fluoro-2-methylphenyl)-4-cyclopropyl-2-fluorobenzamide; (S)—N-(3-(6-Amino-5-((1-(but-2-ynoyl)pyrrolidin-2-yl)methoxy)pyrimidin-4-yl)-5-fluoro-2-methylphenyl)-4-cyclopropyl-2-fluorobenzamide; (S)-2-(3-(5-((1-Acryloylpyrrolidin-2-yl)methoxy)-6-aminopyrimidin-4-yl)-5-fluoro-2-(hydroxymethyl)phenyl)-6-cyclopropyl-3,4-dihydroisoquinolin-1(2H)-one; N-(2-((4-Amino-6-(3-(6-cyclopropyl-1-oxo-3,4-dihydroisoquinolin-2(1H)-yl)-5-fluoro-2-(hydroxymethyl)phenyl)pyrimidin-5-yl)oxy)ethyl)-N-methylacrylamide; N-(3-(5-(((2S,4R)-1-Acryloyl-4-methoxypyrrolidin-2-yl)methoxy)-6-aminopyrimidin-4-yl)-5-fluoro-2-methylphenyl)-4-cyclopropyl-2-fluorobenzamide; N-(3-(6-Amino-5-(((2S,4R)-1-(but-2-ynoyl)-4-methoxypyrrolidin-2-yl)methoxy)pyrimidin-4-yl)-5-fluoro-2-methylphenyl)-4-cyclopropyl-2-fluorobenzamide; 2-(3-(5-(((2S,4R)-1-Acryloyl-4-methoxypyrrolidin-2-yl)methoxy)-6-aminopyrimidin-4-yl)-5-fluoro-2-(hydroxymethyl)phenyl)-6-cyclopropyl-3,4-dihydroisoquinolin-1(2H)-one; N-(3-(5-(((2S,4S)-1-Acryloyl-4-methoxypyrrolidin-2-yl)methoxy)-6-aminopyrimidin-4-yl)-5-fluoro-2-methylphenyl)-4-cyclopropyl-2-fluorobenzamide; N-(3-(6-Amino-5-(((2S,4S)-1-(but-2-ynoyl)-4-methoxypyrrolidin-2-yl)methoxy)pyrimidin-4-yl)-5-fluoro-2-methylphenyl)-4-cyclopropyl-2-fluorobenzamide; N-(3-(5-(((2S,4R)-1-Acryloyl-4-fluoropyrrolidin-2-yl)methoxy)-6-aminopyrimidin-4-yl)-5-fluoro-2-methylphenyl)-4-cyclopropyl-2-fluorobenzamide; N-(3-(6-Amino-5-(((2S,4R)-1-(but-2-ynoyl)-4-fluoropyrrolidin-2-yl)methoxy)pyrimidin-4-yl)-5-fluoro-2-methylphenyl)-4-cyclopropyl-2-fluorobenzamide; (S)—N-(3-(5-((1-Acryloylazetidin-2-yl)methoxy)-6-aminopyrimidin-4-yl)-5-fluoro-2-methylphenyl)-4-cyclopropyl-2-fluorobenzamide; (S)—N-(3-(6-Amino-5-((1-propioloylazetidin-2-yl)methoxy)pyrimidin-4-yl)-5-fluoro-2-methylphenyl)-4-cyclopropyl-2-fluorobenzamide; (S)-2-(3-(5-((1-Acryloylazetidin-2-yl)methoxy)-6-aminopyrimidin-4-yl)-5-fluoro-2-(hydroxymethyl)phenyl)-6-cyclopropyl-3,4-dihydroisoquinolin-1(2H)-one; (R)—N-(3-(5-((1-Acryloylazetidin-2-yl)methoxy)-6-aminopyrimidin-4-yl)-5-fluoro-2-methylphenyl)-4-cyclopropyl-2-fluorobenzamide; (R)—N-(3-(5-((1-Acryloylpiperidin-3-yl)methoxy)-6-aminopyrimidin-4-yl)-5-fluoro-2-methylphenyl)-4-cyclopropyl-2-fluorobenzamide; N-(3-(5-(((2R,3S)-1-Acryloyl-3-methoxypyrrolidin-2-yl)methoxy)-6-aminopyrimidin-4-yl)-5-fluoro-2-methylphenyl)-4-cyclopropyl-2-fluorobenzamide; N-(3-(5-(((2S,4R)-1-Acryloyl-4-cyanopyrrolidin-2-yl)methoxy)-6-aminopyrimidin-4-yl)-5-fluoro-2-methylphenyl)-4-cyclopropyl-2-fluorobenzamide; or N-(3-(5-(((2S,4S)-1-Acryloyl-4-cyanopyrrolidin-2-yl)methoxy)-6-aminopyrimidin-4-yl)-5-fluoro-2-methylphenyl)-4-cyclopropyl-2-fluorobenzamide.

[0995] Unless otherwise provided, the chemical terms used above in describing the BTK inhibitor of Formula I are used according to their meanings as set out in International Application WO/2015/079417, which is herein incorporated by reference in its entirety.

[0996] In one embodiment, the kinase inhibitor is an mTOR inhibitor selected from temsirolimus; ridaforolimus (1R,2R,4S)-4-[(2R)-2 [(1R,9S,12S,15R,16E,18R,19R,21R,23S,24E,26E,28Z,30S,32S,35R)-1,18-dihydroxy-19,30-dimethoxy-15,17,21,23,29,35-hexamethyl-2,3,10,14,20-pentaoxo-11,36-dioxa-4-azatricyclo[30.3.1.0^{4,9}] hexatriaconta-16,24,26,28-tetraen-12-yl]propyl]-2-methoxycyclohexyl dimethylphosphinate, also known as AP23573 and MK8669; everolimus (RAD001); rapamycin (AY22989); simapimod; (5-{2,4-bis[(3S)-3-methylmorpholin-4-yl]pyrido[2,3-d]pyrimidin-7-yl}-2-methoxyphenyl)methanol (AZD8055); 2-amino-8-[trans-4-(2-hydroxyethoxy)cyclohexyl]-6-(6-methoxy-3-pyridinyl)-4-methyl-pyrido[2,3-d]pyrimidin-7(8H)-one (PF04691502); and N²-[1,4-dioxo-4-[[4-(4-oxo-8-phenyl-4H-1-benzopyran-2-yl)morpholinium-4-yl]methoxy]butyl]-L-arginylglycyl-L-α-aspartylL-serine-, inner salt (SF1126) (SEQ ID NO: 1316); and XL765.

[0997] In one embodiment, the kinase inhibitor is an mTOR inhibitor, e.g., rapamycin, and the rapamycin is administered at a dose of about 3 mg, 4 mg, 5 mg, 6 mg, 7 mg, 8 mg, 9 mg, 10 mg (e.g., 6 mg) daily for a period of time, e.g., daily for 21 day cycle, or daily for 28 day cycle. In one embodiment, 1, 2, 3, 4, 5, 6, 7, 8, 9, 10, 11, 12 or more cycles of rapamycin are administered. In one embodiment, the kinase inhibitor is an mTOR inhibitor, e.g., everolimus and the everolimus is administered at a dose of about 2 mg, 2.5 mg, 3 mg, 4 mg, 5 mg, 6 mg, 7 mg, 8 mg, 9 mg, 10 mg, 11 mg, 12 mg, 13 mg, 14 mg, 15 mg (e.g., 10 mg) daily for a period of time, e.g., daily for 28 day cycle. In one embodiment, 1, 2, 3, 4, 5, 6, 7, 8, 9, 10, 11, 12 or more cycles of everolimus are administered.

[0998] In one embodiment, the kinase inhibitor is an MNK inhibitor selected from CGP052088; 4-amino-3-(p-fluorophenylamino)-pyrazolo[3,4-d] pyrimidine (CGP57380); cercosporamide; ETC-1780445-2; and 4-amino-5-(4-fluoroanilino)-pyrazolo[3,4-d] pyrimidine.

[0999] In embodiments, a CAR-expressing cell described herein is administered to a subject in combination with a phosphoinositide 3-kinase (PI3K) inhibitor (e.g., a PI3K inhibitor described herein, e.g., idelalisib or duvelisib) and/or rituximab. In embodiments, a CAR-expressing cell described herein is administered to a subject in combination with idelalisib and rituximab. In embodiments, a CAR-expressing cell described herein is administered to a subject in combination with duvelisib and rituximab. Idelalisib (also called GS-1101 or CAL-101; Gilead) is a small molecule that blocks the delta isoform of PI3K. The chemical name for idelalisib is (5-Fluoro-3-phenyl-2-[(1S)-1-(7H-purin-6-ylamino)propyl]-4(3H)-quinazolinone).

[1000] Duvelisib (also called IPI-145; Infinity Pharmaceuticals and Abbvie) is a small molecule that blocks PI3K-δ,γ. The chemical name for duvelisib is (8-Chloro-2-phenyl-3-[(1S)-1-(9H-purin-6-ylamino)ethyl]-1(2H)-isoquinolinone).

[1001] In embodiments, the subject has CLL. In embodiments, the subject has relapsed CLL, e.g., the subject has previously been administered a cancer therapy (e.g., previously been administered an anti-CD20 antibody or previously been administered ibrutinib). For example, the subject has a deletion in the short arm of chromosome 17 (del(17p), e.g., in a leukemic cell). In other examples, the subject does not have a del(17p). In embodiments, the subject comprises a leukemic cell comprising a mutation in the immunoglobulin heavy-chain variable-region (IgV_{H}) gene. In other embodiments, the subject does not comprise a leukemic cell comprising a mutation in the immunoglobulin heavy-chain variable-region (IgV_{H}) gene. In embodiments, the subject has a deletion in the long arm of chromosome 11 (del(11q)). In other embodiments, the subject does not have a del(11q). In embodiments, idelalisib is administered at a dosage of about 100-400 mg (e.g., 100-125, 125-150, 150-175, 175-200, 200-225, 225-250, 250-275, 275-300, 325-350, 350-375, or 375-400 mg), e.g., BID. In embodiments, duvelisib is administered at a dosage of about 15-100 mg (e.g., about 15-25, 25-50, 50-75, or 75-100 mg), e.g., twice a day. In embodiments, rituximab is administered at a dosage of about 350-550 mg/m² (e.g., 350-375, 375-400, 400-425, 425-450, 450-475, or 475-500 mg/m²), e.g., intravenously.

[1002] In one embodiment, the kinase inhibitor is a dual phosphatidylinositol 3-kinase (PI3K) and mTOR inhibitor selected from 2-Amino-8-[trans-4-(2-hydroxyethoxy)cyclohexyl]-6-(6-methoxy-3-pyridinyl)-4-methyl-pyrido[2,3-d]pyrimidin-7(8H)-one (PF-04691502); N-[4-[[4-(Dimethylamino)-1-piperidinyl]carbonyl]phenyl]-IV-[4-(4,6-di-4-morpholinyl-1,3,5-triazin-2-yl)phenyl]urea (PF-05212384, PKI-587); 2-Methyl-2-{4-[3-methyl-2-oxo-8-(quinolin-3-yl)-2,3-dihydro-1H-imidazo[4,5-c]quinolin-1-yl]phenyl}propanenitrile (BEZ-235); apitolisib (GDC-0980, RG7422); 2,4-Difluoro-N-{2-(methyloxy)-5-[4-(4-pyridazinyl)-6-quinolinyl]-3-pyridinyl}benzenesulfonamide (GSK2126458); 8-(6-methoxypyridin-3-yl)-3-methyl-1-(4-(piperazin-1-yl)-3-(trifluoromethyl)phenyl)-1H-imidazo[4,5-c]quinolin-2(3H)-one Maleic acid (NVP-BGT226); 3-[4-(4-Morpholinylpyrido[3′,2′:4,5]furo[3,2-d]pyrimidin-2-yl]phenol (PI-103); 5-(9-isopropyl-8-methyl-2-morpholino-9H-purin-6-yl)pyrimidin-2-amine (VS-5584, SB2343); and N-[2-[(3,5-Dimethoxyphenyl)amino]quinoxalin-3-yl]-4-[(4-methyl-3-methoxyphenyl)carbonyl]aminophenylsulfonamide (XL765).

[1003] In embodiments, a CAR-expressing cell described herein is administered to a subject in combination with an anaplastic lymphoma kinase (ALK) inhibitor. Exemplary ALK kinases include but are not limited to crizotinib (Pfizer), ceritinib (Novartis), alectinib (Chugai), brigatinib (also called AP26113; Ariad), entrectinib (Ignyta), PF-06463922 (Pfizer), TSR-011 (Tesaro) (see, e.g., Clinical Trial Identifier No. NCT02048488), CEP-37440 (Teva), and X-396 (Xcovery). In some embodiments, the subject has a solid cancer, e.g., a solid cancer described herein, e.g., lung cancer.

[1004] The chemical name of crizotinib is 3-[(1R)-1-(2,6-dichloro-3-fluorophenyl)ethoxy]-5-(1-piperidin-4-ylpyrazol-4-yl)pyridin-2-amine. The chemical name of ceritinib is 5-Chloro-N²-[2-isopropoxy-5-methyl-4-(4-piperidinyl)phenyl]-N⁴-[2-(isopropylsulfonyl)phenyl]-2,4-pyrimidinediamine. The chemical name of alectinib is 9-ethyl-6,6-dimethyl-8-(4-morpholinopiperidin-1-yl)-11-oxo-6,11-dihydro-5H-benzo[b]carbazole-3-carbonitrile. The chemical name of brigatinib is 5-Chloro-N²-{4-[4-(dimethylamino)-1-piperidinyl]-2-methoxyphenyl}-N⁴-[2-(dimethylphosphoryl)phenyl]-2,4-pyrimidinediamine. The chemical name of entrectinib is N-(5-(3,5-difluorobenzyl)-1H-indazol-3-yl)-4-(4-methylpiperazin-1-yl)-2-((tetrahydro-2H-pyran-4-yl)amino)benzamide. The chemical name of PF-06463922 is (10R)-7-Amino-12-fluoro-2,10,16-trimethyl-15-oxo-10,15,16,17-tetrahydro-2H-8,4-(metheno)pyrazolo[4,3-h][2,5,11]-benzoxadiazacyclotetradecine-3-carbonitrile. The chemical structure of CEP-37440 is (S)-2-((5-chloro-2-((6-(4-(2-hydroxyethyl)piperazin-1-yl)-1-methoxy-6,7,8,9-tetrahydro-5H-benzo[7]annulen-2-yl)amino)pyrimidin-4-yl)amino)-N-methylbenzamide. The chemical name of X-396 is (R)-6-amino-5-(1-(2,6-dichloro-3-fluorophenyl)ethoxy)-N-(4-(4-methylpiperazine-1-carbonyl)phenyl)pyridazine-3-carboxamide.

[1005] In one embodiment, the kinase inhibitor is an ITK inhibitor selected from ibrutinib; N-(5-(5-(4-Acetylpiperazine-1-carbonyl)-4-methoxy-2-methylphenylthio)thiazol-2-yl)-4-((3,3-dimethylbutan-2-ylamino)methyl)benzamide (BMS-509744); 7-benzyl-1-(3-(piperidin-1-yl)propyl)-2-(4-(pyridin-4-yl)phenyl)-1H-imidazo[4,5-g]quinoxalin-6(5H)-one (CTA056); R)-3-(1-(1-Acryloylpiperidin-3-yl)-4-amino-1H-pyrazolo[3,4-d]pyrimidin-3-yl)-N-(3-methyl-4-(1-methylethyl))benzamide (PF-06465469).

[1006] Drugs that inhibit either the calcium dependent phosphatase calcineurin (cyclosporine and FK506) or inhibit the p70S6 kinase that is important for growth factor induced signaling (rapamycin). (Liu et al., Cell 66:807-815, 1991; Henderson et al., Immun. 73:316-321, 1991; Bierer et al., Curr. Opin. Immun. 5:763-773, 1993) can also be used. In a further aspect, the cell compositions of the present invention may be administered to a patient in conjunction with (e.g., before, simultaneously or following) bone marrow transplantation, T cell ablative therapy using chemotherapy agents such as, fludarabine, external-beam radiation therapy (XRT), cyclophosphamide, and/or antibodies such as OKT3 or CAMPATH. In one aspect, the cell compositions of the present invention are administered following B-cell ablative therapy such as agents that react with CD20, e.g., Rituxan. For example, in one embodiment, subjects may undergo standard treatment with high dose chemotherapy followed by peripheral blood stem cell transplantation. In certain embodiments, following the transplant, subjects receive an infusion of the expanded immune cells of the present invention. In an additional embodiment, expanded cells are administered before or following surgery.

[1007] In embodiments, a CAR-expressing cell described herein is administered to a subject in combination with an indoleamine 2,3-dioxygenase (IDO) inhibitor. IDO is an enzyme that catalyzes the degradation of the amino acid, L-tryptophan, to kynurenine. Many cancers overexpress IDO, e.g., prostatic, colorectal, pancreatic, cervical, gastric, ovarian, head, and lung cancer. pDCs, macrophages, and dendritic cells (DCs) can express IDO. Without being bound by theory, it is thought that a decrease in L-tryptophan (e.g., catalyzed by IDO) results in an immunosuppressive milieu by inducing T-cell anergy and apoptosis. Thus, without being bound by theory, it is thought that an IDO inhibitor can enhance the efficacy of a CAR-expressing cell described herein, e.g., by decreasing the suppression or death of a CAR-expressing immune cell. In embodiments, the subject has a solid tumor, e.g., a solid tumor described herein, e.g., prostatic, colorectal, pancreatic, cervical, gastric, ovarian, head, or lung cancer. Exemplary inhibitors of IDO include but are not limited to 1-methyl-tryptophan, indoximod (NewLink Genetics) (see, e.g., Clinical Trial Identifier Nos. NCT01191216; NCT01792050), and INCB024360 (Incyte Corp.) (see, e.g., Clinical Trial Identifier Nos. NCT01604889; NCT01685255)

[1008] In embodiments, a CAR-expressing cell described herein is administered to a subject in combination with a modulator of myeloid-derived suppressor cells (MDSCs). MDSCs accumulate in the periphery and at the tumor site of many solid tumors. These cells suppress T cell responses, thereby hindering the efficacy of CAR-expressing cell therapy. Without being bound by theory, it is thought that administration of a MDSC modulator enhances the efficacy of a CAR-expressing cell described herein. In an embodiment, the subject has a solid tumor, e.g., a solid tumor described herein, e.g., glioblastoma. Exemplary modulators of MDSCs include but are not limited to MCS110 and BLZ945. MCS110 is a monoclonal antibody (mAb) against macrophage colony-stimulating factor (M-CSF). See, e.g., Clinical Trial Identifier No. NCT00757757. BLZ945 is a small molecule inhibitor of colony stimulating factor 1 receptor (CSF1R). See, e.g., Pyonteck et al. Nat. Med. 19(2013):1264-72.

[1009] In embodiments, a CAR-expressing cell described herein is administered to a subject in combination with a CD19 CART cell (e.g., CTL019, e.g., as described in WO2012/079000, incorporated herein by reference). In embodiments, the subject has acute myeloid leukemia (AML), e.g., a CD19 positive AML or a CD19 negative AML. In embodiments, the subject has a CD19+ lymphoma, e.g., a CD19+ Non-Hodgkin's Lymphoma (NHL), a CD19+FL, or a CD19+ DLBCL. In embodiments, the subject has a relapsed or refractory CD19+ lymphoma. In embodiments, a lymphodepleting therapy is administered to the subject prior to, concurrently with, or after administration (e.g., infusion) of CD19 CART cells. In an example, the lymphodepleting chemotherapy is administered to the subject prior to administration of CD19 CART cells. For example, the lymphodepleting chemotherapy ends 1-4 days (e.g., 1, 2, 3, or 4 days) prior to CD19 CART cell infusion. In embodiments, multiple doses of CD19 CART cells are administered, e.g., as described herein. For example, a single dose comprises about 5×10⁸ CD19 CART cells. In embodiments, a lymphodepleting chemotherapy is administered to the subject prior to, concurrently with, or after administration (e.g., infusion) of a CAR-expressing cell described herein, e.g., a non-CD19 CAR-expressing cell. In embodiments, a CD19 CART is administered to the subject prior to, concurrently with, or after administration (e.g., infusion) of a non-CD19 CAR-expressing cell, e.g., a non-CD19 CAR-expressing cell described herein.

[1010] In some embodiments, a CAR-expressing cell described herein is administered to a subject in combination with a CD19 CAR-expressing cell, e.g., CTL019, e.g., as described in WO2012/079000, incorporated herein by reference, for treatment of a disease associated with the expression of CLL-1, e.g., a cancer described herein. Without being bound by theory, it is believed that administering a CD19 CAR-expressing cell in combination with a CAR-expressing cell improves the efficacy of a CAR-expressing cell described herein by targeting early lineage cancer cells, e.g., cancer stem cells, modulating the immune response, depleting regulatory B cells, and/or improving the tumor microenvironment. For example, a CD19 CAR-expressing cell targets cancer cells that express early lineage markers, e.g., cancer stem cells and CD19-expressing cells, while the CAR-expressing cell described herein targets cancer cells that express later lineage markers, e.g., CLL-1. This preconditioning approach can improve the efficacy of the CAR-expressing cell described herein. In such embodiments, the CD19 CAR-expressing cell is administered prior to, concurrently with, or after administration (e.g., infusion) of a CAR-expressing cell described herein.

[1011] In embodiments, a CAR-expressing cell described herein also expresses a CAR targeting CD19, e.g., a CD19 CAR. In an embodiment, the cell expressing a CAR described herein and a CD19 CAR is administered to a subject for treatment of a cancer described herein, e.g., AML. In an embodiment, the configurations of one or both of the CAR molecules comprise a primary intracellular signaling domain and a costimulatory signaling domain. In another embodiment, the configurations of one or both of the CAR molecules comprise a primary intracellular signaling domain and two or more, e.g., 2, 3, 4, or 5 or more, costimulatory signaling domains. In such embodiments, the CAR molecule described herein and the CD19 CAR may have the same or a different primary intracellular signaling domain, the same or different costimulatory signaling domains, or the same number or a different number of costimulatory signaling domains. Alternatively, the CAR described herein and the CD19 CAR are configured as a split CAR, in which one of the CAR molecules comprises an antigen binding domain and a costimulatory domain (e.g., 4-1BB), while the other CAR molecule comprises an antigen binding domain and a primary intracellular signaling domain (e.g., CD3 zeta).

[1012] In some embodiments, a CAR-expressing cell described herein is administered to a subject in combination with a interleukin-15 (IL-15) polypeptide, a interleukin-15 receptor alpha (IL-15Ra) polypeptide, or a combination of both a IL-15 polypeptide and a IL-15Ra polypeptide e.g., hetIL-15 (Admune Therapeutics, LLC). hetIL-15 is a heterodimeric non-covalent complex of IL-15 and IL-15Ra. hetIL-15 is described in, e.g., U.S. Pat. No. 8,124,084, U.S. 2012/0177598, U.S. 2009/0082299, U.S. 2012/0141413, and U.S. 2011/0081311, incorporated herein by reference. In embodiments, het-IL-15 is administered subcutaneously. In embodiments, the subject has a cancer, e.g., as described herein. In some embodiments the cancer is a hematological cancer (e.g., as described herein) or, a solid cancer. In some embodiments, the solid cancer is, e.g., melanoma or colon cancer. In embodiments, the subject has a metastatic cancer.

[1013] In embodiments, a subject having a disease described herein, e.g., a hematological disorder, e.g., AML or MDS, is administered a CAR-expressing cell described herein in combination with an agent, e.g., cytotoxic or chemotherapy agent, a biologic therapy (e.g., antibody, e.g., monoclonal antibody, or cellular therapy), or an inhibitor (e.g., kinase inhibitor). In embodiments, the subject is administered a CAR-expressing cell described herein in combination with a cytotoxic agent, e.g., CPX-351 (Celator Pharmaceuticals), cytarabine, daunorubicin, vosaroxin (Sunesis Pharmaceuticals), sapacitabine (Cyclacel Pharmaceuticals), idarubicin, or mitoxantrone. CPX-351 is a liposomal formulation comprising cytarabine and daunorubicin at a 5:1 molar ratio. In embodiments, the subject is administered a CAR-expressing cell described herein in combination with a hypomethylating agent, e.g., a DNA methyltransferase inhibitor, e.g., azacitidine or decitabine. In embodiments, the subject is administered a CAR-expressing cell described herein in combination with a biologic therapy, e.g., an antibody or cellular therapy, e.g., 225Ac-lintuzumab (Actimab-A; Actinium Pharmaceuticals), IPH2102 (Innate Pharma/Bristol Myers Squibb), SGN-CD33A (Seattle Genetics), or gemtuzumab ozogamicin (Mylotarg; Pfizer). SGN-CD33A is an antibody-drug conjugate (ADC) comprising a pyrrolobenzodiazepine dimer that is attached to an anti-CD33 antibody. Actimab-A is an anti-CD33 antibody (lintuzumab) labeled with actinium. IPH2102 is a monoclonal antibody that targets killer immunoglobulin-like receptors (KIRs). In embodiments, the subject is administered a CAR-expressing cell described herein in combination a FLT3 inhibitor, e.g., sorafenib (Bayer), midostaurin (Novartis), quizartinib (Daiichi Sankyo), crenolanib (Arog Pharmaceuticals), PLX3397 (Daiichi Sankyo), AKN-028 (Akinion Pharmaceuticals), or ASP2215 (Astellas). In embodiments, the subject is administered a CAR-expressing cell described herein in combination with an isocitrate dehydrogenase (IDH) inhibitor, e.g., AG-221 (Celgene/Agios) or AG-120 (Agios/Celgene). In embodiments, the subject is administered a CAR-expressing cell described herein in combination with a cell cycle regulator, e.g., inhibitor of polo-like kinase 1 (Plk1), e.g., volasertib (Boehringer Ingelheim); or an inhibitor of cyclin-dependent kinase 9 (Cdk9), e.g., alvocidib (Tolero Pharmaceuticals/Sanofi Aventis). In embodiments, the subject is administered a CAR-expressing cell described herein in combination with a B cell receptor signaling network inhibitor, e.g., an inhibitor of B-cell lymphoma 2 (Bcl-2), e.g., venetoclax (Abbvie/Roche); or an inhibitor of Bruton's tyrosine kinase (Btk), e.g., ibrutinib (Pharmacyclics/Johnson & Johnson Janssen Pharmaceutical). In embodiments, the subject is administered a CAR-expressing cell described herein in combination with an inhibitor of M1 aminopeptidase, e.g., tosedostat (CTI BioPharmaNernalis); an inhibitor of histone deacetylase (HDAC), e.g., pracinostat (MEI Pharma); a multi-kinase inhibitor, e.g., rigosertib (Onconova Therapeutics/Baxter/SymBio); or a peptidic CXCR4 inverse agonist, e.g., BL-8040 (BioLineRx).

[1014] In another embodiment, the subjects receive an infusion of the CAR expressing cell, e.g., CD19 CAR-expressing cell, compositions of the present invention prior to transplantation, e.g., allogeneic stem cell transplant or autologous stem cell transplant, of cells. In some embodiments, CAR expressing cells transiently express the CAR, e.g., by electroporation of an mRNA CAR, whereby the expression of the antigen targeted by the CAR, e.g., CD19 is terminated prior to infusion of donor stem cells to avoid engraftment failure. In one embodiment, the subject can be administered an agent which reduces or ameliorates a side effect associated with the administration of a CAR-expressing cell. Side effects associated with the administration of a CAR-expressing cell include, but are not limited to CRS, and hemophagocytic lymphohistiocytosis (HLH), also termed Macrophage Activation Syndrome (MAS). Symptoms of CRS include high fevers, nausea, transient hypotension, hypoxia, and the like. Accordingly, the methods described herein can comprise administering a CAR-expressing cell described herein to a subject and further administering an agent to manage elevated levels of a soluble factor resulting from treatment with a CAR-expressing cell. In one embodiment, the soluble factor elevated in the subject is one or more of IFN-γ, TNFα, IL-2 and IL-6. Therefore, an agent administered to treat this side effect can be an agent that neutralizes one or more of these soluble factors. Examples of such agents include, but are not limited to a steroid (e.g., corticosteroid), an inhibitor of TNFα, and an inhibitor of IL-6. An example of a TNFα inhibitor is an anti-TNFα antibody molecule such as, infliximab, adalimumab, certolizumab pegol, and golimumab. Another example of a TNFα inhibitor is a fusion protein such as entanercept. Small molecule inhibitor of TNFα include, but are not limited to, xanthine derivatives (e.g. pentoxifylline) and bupropion. An example of an IL-6 inhibitor is an anti-IL-6 antibody molecule such as tocilizumab (toc), sarilumab, elsilimomab, CNTO 328, ALD518/BMS-945429, CNTO 136, CPSI-2364, CDP6038, VX30, ARGX-109, FE301, and FM101. In one embodiment, the anti-IL-6 antibody molecule is tocilizumab. An example of an IL-1R based inhibitor is anakinra.

### Lymphodepletion

[1015] In embodiments, lymphodepletion is performed on a subject, e.g., prior to administering one or more cells that express a CAR described herein. In embodiments, the lymphodepletion comprises administering one or more of melphalan, cytoxan, bendamustine, cyclophosphamide, and fludarabine.

[1016] In embodiments, the lymphodepletion comprises administering cyclophosphamide. In embodiments, cyclophosphamide is administered daily, e.g., for 2 or 3 days, at a dosage of about 200-700 mg/m² (e.g., 200-300, 400-600, or 450-550 mg/m², e.g., about 250 mg/m2 or 500 mg/m²), e.g., intravenously. In some embodiments, cyclophosphamide is administered at a dosage of about 250 mg/m2 per day, for 3 days. In some embodiments, cyclophosphamide is administered at a dosage of about 500 mg/m2 per day, for 2 days.

[1017] In embodiments, the lymphodepletion comprises administering fludarabine. In embodiments, fludarabine is administered daily, e.g., for 3 or 4 days, at a dosage of about 10-50 mg/m2 (e.g., 20-30, 25-40 or 25-35 mg/m2, e.g., about 25 mg/m2 or 30 mg/m2), e.g., intravenously. In some embodiments, fludarabine is administered at a dosage of about 30 mg/m2 per day, for 4 days. In some embodiments, fludarabine is administered at a dosage of about 25 mg/m2 per day, for 3 days.

[1018] In embodiments, the lymphodepletion comprises administering cyclophosphamide and fludarabine. In some embodiments, the lymphodepletion comprises administering 500 mg/m2 cyclophosphamide daily for 2 days and 30 mg/m2 fludarabine daily for 3 days. In some embodiments, the lymphodepletion comprises administering 250 mg/m2 cyclophosphamide daily for 3 days, and 25 mg/m2 fludarabine daily for 3 days. In some embodiments, the lymphodepletion begins with the administration of the first dose of fludarabine. In some embodiments, cyclophosphamide and fludarabine are administered on the same day. In some embodiments, cyclophosphamide and fludarabine are not administered on the same day. In some embodiments, the daily dosages are administered on consecutive days.

[1019] In embodiments, the lymphodepletion comprises administering bendamustine. In some embodiments, bendamustine is administered daily, e.g., twice daily, at a dosage of about 75-125 mg/m2 (e.g., 75-100 or 100-125 mg/m², e.g., about 90 mg/m²), e.g., intravenously. In some embodiments, bendamustine is administered at dosage of 90 mg/m² daily, e.g., for 2 days. In some embodiments, the subject has a cancer, e.g., a hematological cancer as described herein.

[1020] In embodiments, the lymphodepletion comprises administering bendamustine (e.g., at about 90 mg/m², e.g., daily x 2), cyclophosphamide and fludarabine (e.g., at about 200 mg/m² cyclophosphamide and about 20 mg/m² fludarabine, e.g., daily x 3), XRT and cyclophosphamide (e.g., at about 400 cGy XRT and about 1 g/m² cyclophosphamide), cyclophosphamide (e.g., about 1 g/m² or 1.2 g/m² cyclophosphamide, e.g., over 4 days), carboplatin and gemcitabine, or modified EPOCH.

[1021] In embodiments, a lymphodepleting therapy is administered to the subject prior to, concurrently with, or after administration (e.g., infusion) of CAR cells, e.g., cells described herein. In an example, the lymphodepleting therapy is administered to the subject prior to administration of CAR cells. For example, the lymphodepleting therapy ends 1-4 days (e.g., 1, 2, 3, or 4 days) prior to CAR cell infusion. In embodiments, multiple doses of CAR cells are administered, e.g., as described herein. For example, a single dose comprises about 5×10⁸ CAR cells. In embodiments, a lymphodepleting therapy is administered to the subject prior to, concurrently with, or after administration (e.g., infusion) of a CAR-expressing cell described herein.

[1022] In some embodiments, CAR-expressing cells described herein are administered to a subject in combination with a CD19 CAR-expressing cell, e.g., CTL019, e.g., as described in WO2012/079000, incorporated herein by reference, for treatment of a disease associated with the expression of cancer antigen, e.g., a cancer described herein. Without being bound by theory, it is believed that administering a CD19 CAR-expressing cell in combination with another CAR-expressing cell improves the efficacy of a CAR-expressing cell described herein by targeting early lineage cancer cells, e.g., cancer stem cells, modulating the immune response, depleting regulatory B cells, and/or improving the tumor microenvironment. For example, a CD19 CAR-expressing cell targets cancer cells that express early lineage markers, e.g., cancer stem cells and CD19-expressing cells, while some other CAR-expressing cells described herein target cancer cells that express later lineage markers. This preconditioning approach can improve the efficacy of the CAR-expressing cell described herein. In such embodiments, the CD19 CAR-expressing cell is administered prior to, concurrently with, or after administration (e.g., infusion) of the second CAR-expressing cell.

[1023] In embodiments, a CAR-expressing cell which expresses a CAR targeting a cancer antigen other than CD19 also expresses a CAR targeting CD19, e.g., a CD19 CAR. In an embodiment, the cell expressing a non-CD19 CAR and a CD19 CAR is administered to a subject for treatment of a cancer described herein, e.g., AML. In an embodiment, the configurations of one or both of the CAR molecules comprise a primary intracellular signaling domain and a costimulatory signaling domain. In another embodiment, the configurations of one or both of the CAR molecules comprise a primary intracellular signaling domain and two or more, e.g., 2, 3, 4, or 5 or more, costimulatory signaling domains. In such embodiments, the non-CD19 CAR molecule and the CD19 CAR may have the same or a different primary intracellular signaling domain, the same or different costimulatory signaling domains, or the same number or a different number of costimulatory signaling domains. Alternatively, the non-CD19 CAR and the CD19 CAR are configured as a split CAR, in which one of the CAR molecules comprises an antigen binding domain and a costimulatory domain (e.g., 4-1BB), while the other CAR molecule comprises an antigen binding domain and a primary intracellular signaling domain (e.g., CD3 zeta).

### Inhibitory Molecule Inhibitors/Checkpoint Inhibitors

[1024] In one embodiment, the subject can be administered an agent which enhances the activity of a CAR-expressing cell. For example, in one embodiment, the agent can be an agent which inhibits an inhibitory molecule, e.g., the agent is a checkpoint inhibitor. Inhibitory or checkpoint molecules, e.g., Programmed Death 1 (PD1), can, in some embodiments, decrease the ability of a CAR-expressing cell to mount an immune effector response. Examples of inhibitory molecules include PD1, PD-L1, PD-L2, CTLA4, TIM3, CEACAM (e.g., CEACAM-1, CEACAM-3 and/or CEACAM-5), LAGS, VISTA, BTLA, TIGIT, LAIR1, CD160, 2B4, CD160, 2B4, CD80, CD86, B7-H3 (CD276), B7-H4 (VTCN1), HVEM (TNFRSF14 or CD270), KIR, A2aR, MHC class I, MHC class II, GALS, adenosine, and TGF (e.g., TGF beta). In embodiments, the CAR-expressing cell described herein comprises a switch costimulatory receptor, e.g., as described in WO 2013/019615, which is incorporated herein by reference in its entirety.

[1025] The methods described herein can include administration of a CAR-expressing cell in combination with a checkpoint inhibitor. In one embodiment, the subject is a complete responder. In another embodiment, the subject is a partial responder or non-responder, and, e.g., in some embodiments, the checkpoint inhibitor is administered prior to the CAR-expressing cell, e.g., two weeks, 12 days, 10 days, 8 days, one week, 6 days, 5 days, 4 days, 3 days, 2 days or 1 day before administration of the CAR-expressing cell. In some embodiments, the checkpoint inhibitor is administered concurrently with the CAR-expressing cell.

[1026] Inhibition of an inhibitory molecule, e.g., by inhibition at the DNA, RNA or protein level, can optimize a CAR-expressing cell performance. In embodiments, an inhibitory nucleic acid, e.g., an inhibitory nucleic acid, e.g., a dsRNA, e.g., an siRNA or shRNA, or a clustered regularly interspaced short palindromic repeats (CRISPR), a transcription-activator like effector nuclease (TALEN), or a zinc finger endonuclease (ZFN), can be used to inhibit expression of an inhibitory molecule in the CAR-expressing cell. In an embodiment the inhibitor is an shRNA. In an embodiment, the inhibitory molecule is inhibited within a CAR-expressing cell. In these embodiments, a dsRNA molecule that inhibits expression of the inhibitory molecule is linked to the nucleic acid that encodes a component, e.g., all of the components, of the CAR.

[1027] In an embodiment, a nucleic acid molecule that encodes a dsRNA molecule that inhibits expression of the molecule that modulates or regulates, e.g., inhibits, T-cell function is operably linked to a promoter, e.g., a H1- or a U6-derived promoter such that the dsRNA molecule that inhibits expression of the molecule that modulates or regulates, e.g., inhibits, T-cell function is expressed, e.g., is expressed within a CAR-expressing cell. See e.g., Tiscornia G., “Development of Lentiviral Vectors Expressing siRNA,” Chapter 3, in Gene Transfer: Delivery and Expression of DNA and RNA (eds. Friedmann and Rossi). Cold Spring Harbor Laboratory Press, Cold Spring Harbor, N.Y., USA, 2007; Brummelkamp T R, et al. (2002) Science 296: 550-553; Miyagishi M, et al. (2002) Nat. Biotechnol. 19: 497-500. In an embodiment the nucleic acid molecule that encodes a dsRNA molecule that inhibits expression of the molecule that modulates or regulates, e.g., inhibits, T-cell function is present on the same vector, e.g., a lentiviral vector, that comprises a nucleic acid molecule that encodes a component, e.g., all of the components, of the CAR. In such an embodiment, the nucleic acid molecule that encodes a dsRNA molecule that inhibits expression of the molecule that modulates or regulates, e.g., inhibits, T-cell function is located on the vector, e.g., the lentiviral vector, 5′- or 3′- to the nucleic acid that encodes a component, e.g., all of the components, of the CAR. The nucleic acid molecule that encodes a dsRNA molecule that inhibits expression of the molecule that modulates or regulates, e.g., inhibits, T-cell function can be transcribed in the same or different direction as the nucleic acid that encodes a component, e.g., all of the components, of the CAR. In an embodiment the nucleic acid molecule that encodes a dsRNA molecule that inhibits expression of the molecule that modulates or regulates, e.g., inhibits, T-cell function is present on a vector other than the vector that comprises a nucleic acid molecule that encodes a component, e.g., all of the components, of the CAR. In an embodiment, the nucleic acid molecule that encodes a dsRNA molecule that inhibits expression of the molecule that modulates or regulates, e.g., inhibits, T-cell function it transiently expressed within a CAR-expressing cell. In an embodiment, the nucleic acid molecule that encodes a dsRNA molecule that inhibits expression of the molecule that modulates or regulates, e.g., inhibits, T-cell function is stably integrated into the genome of a CAR-expressing cell. In an embodiment, the molecule that modulates or regulates, e.g., inhibits, T-cell function is PD-1.

[1028] In one embodiment, the inhibitor of an inhibitory signal can be, e.g., an antibody or antibody fragment that binds to an inhibitory molecule. For example, the agent can be an antibody or antibody fragment that binds to PD1, PD-L1, PD-L2 or CTLA4 (e.g., ipilimumab (also referred to as MDX-010 and MDX-101, and marketed as Yervoy®; Bristol-Myers Squibb; Tremelimumab (IgG2 monoclonal antibody available from Pfizer, formerly known as ticilimumab, CP-675,206)). In an embodiment, the agent is an antibody or antibody fragment that binds to TIM3. In an embodiment, the agent is an antibody or antibody fragment that binds to LAG3. In an embodiment, the agent is an antibody or antibody fragment that binds to CEACAM (e.g., CEACAM-1, CEACAM-3 and/or CEACAM-5). In embodiments, the agent that enhances the activity of a CAR-expressing cell, e.g., inhibitor of an inhibitory molecule, is administered in combination with an allogeneic CAR, e.g., an allogeneic CAR described herein (e.g., described in the Allogeneic CAR section herein).

[1029] PD1 is an inhibitory member of the CD28 family of receptors that also includes CD28, CTLA-4, ICOS, and BTLA. PD1 is expressed on activated B cells, T cells and myeloid cells (Agata et al. 1996 Int. Immunol 8:765-75). Two ligands for PD1, PD-L1 and PD-L2 have been shown to downregulate T cell activation upon binding to PD1 (Freeman et a. 2000 J Exp Med 192:1027-34; Latchman et al. 2001 Nat Immunol 2:261-8; Carter et al. 2002 Eur J Immunol 32:634-43). PD-L1 is abundant in human cancers (Dong et al. 2003 J Mol Med 81:281-7; Blank et al. 2005 Cancer Immunol. Immunother 54:307-314; Konishi et al. 2004 Clin Cancer Res 10:5094). Immune suppression can be reversed by inhibiting the local interaction of PD1 with PD-L1.

[1030] Antibodies, antibody fragments, and other inhibitors of PD1, PD-L1 and PD-L2 are available in the art and may be used combination with a CD19 CAR described herein. For example, nivolumab (also referred to as BMS-936558 or MDX1106; Bristol-Myers Squibb) is a fully human IgG4 monoclonal antibody which specifically blocks PD1. Nivolumab (clone 5C4) and other human monoclonal antibodies that specifically bind to PD1 are disclosed in U.S. Pat. No. 8,008,449 and WO2006/121168. Pidilizumab (CT-011; Cure Tech) is a humanized IgG1k monoclonal antibody that binds to PD1. Pidilizumab and other humanized anti-PD1 monoclonal antibodies are disclosed in WO2009/101611. Pembrolizumab (formerly known as lambrolizumab, and also referred to as Keytruda, MK03475; Merck) is a humanized IgG4 monoclonal antibody that binds to PD1. Pembrolizumab and other humanized anti-PD1 antibodies are disclosed in U.S. Pat. No. 8,354,509 and WO2009/114335. MEDI4736 (Medimmune) is a human monoclonal antibody that binds to PDL1, and inhibits interaction of the ligand with PD1. MDPL3280A (Genentech/Roche) is a human Fc optimized IgG1 monoclonal antibody that binds to PD-L1. MDPL3280A and other human monoclonal antibodies to PD-L1 are disclosed in U.S. Pat. No. 7,943,743 and U.S Publication No.: 20120039906. Other anti-PD-L1 binding agents include YW243.55.S70 (heavy and light chain variable regions are shown in SEQ ID NOs 20 and 21 in WO2010/077634) and MDX-1 105 (also referred to as BMS-936559, and, e.g., anti-PD-L1 binding agents disclosed in WO2007/005874). AMP-224 (B7-DCIg; Amplimmune; e.g., disclosed in WO2010/027827 and WO2011/066342), is a PD-L2 Fc fusion soluble receptor that blocks the interaction between PD1 and B7-H1. Other anti-PD1 antibodies include AMP 514 (Amplimmune), among others, e.g., anti-PD1 antibodies disclosed in U.S. Pat. No. 8,609,089, US 2010028330, and/or US 20120114649.

[1031] In some embodiments, a PD1 inhibitor described herein (e.g., a PD1 antibody, e.g., a PD1 antibody described herein) is used combination with a CD19 CAR described herein to treat a disease associated with expression of CD19. In some embodiments, a PD-L1 inhibitor described herein (e.g., a PD-L1 antibody, e.g., a PD-L1 antibody described herein) is used combination with a CD19 CAR described herein to treat a disease associated with expression of CD19. In some embodiments, the CD19 CAR therapy is administered prior to, simultaneously with or after the PD-1 inhibitor. In one embodiment, the CD19 CAR therapy is administered prior to the PD-1 inhibitor. For example, one or more doses of the PD-1 inhibitor can be administered post-CD19 CAR therapy (e.g., starting 5 days to 4 months, e.g., 10 day to 3 months, e.g., 14 days to 2 months post-CD19 CAR therapy). In some embodiments, the combination of the CD19 CAR therapy and PD-1 inhibitor therapy is repeated.

[1032] The disease may be, e.g., a lymphoma such as DLBCL including primary DLBCL or secondary DLBCL. In some embodiments, the subject has, or is identified as having, at least 5%, 6%, 7%, 8%, 9%, 10%, 20%, 30%, 40%, 50%, 60%, 70%, 80%, or 90% of cancer cells, e.g., DLBCL cells, which are CD3+/PD1+. In some embodiments, the subject has, or is identified as having, substantially non-overlapping populations of CD19+ cells and PD-L1+ cells in a cancer, e.g., the cancer microenvironment. For instance, in some embodiments, less than 20%, 10%, 9%, 8%, 7%, 6%, 5%, 4%, 3%, 2%, or 1% of cells in the cancer, e.g., cancer microenvironment, are double positive for CD19 and PD-L1.

[1033] In embodiments of the CD19 CAR therapy-PD1 inhibitor therapy, the CD19 CAR therapy comprises one or more treatments with cells that express a murine CAR molecule described herein, e.g., a murine CD19 CAR molecule of Tables 3, 4 and 5 on pages 359-363 of International Application WO 2016/164731, filed Apr. 8, 2016, which is incorporated by reference in its entirety.

[1034] In another embodiment of the CD19 CAR therapy-PD1 inhibitor therapy, the CD19 CAR therapy comprises one or more treatments with cells that express a humanized CD19 CAR, e.g., a humanized CD19 CAR according to Tables 2, 4 and 5 on page 339-363 of International Application WO 2016/164731, filed Apr. 8, 2016, which is incorporated by reference in its entirety.

[1035] In some embodiments, the subject is treated with a combination of a CD19 CAR, a PD1 inhibitor, and a PD-L1 inhibitor. In some embodiments, the subject is treated with a combination of a CD19 CAR, a PD1 inhibitor, and a CD3 inhibitor. In some embodiments, the subject is treated with a combination of a CD19 CAR, a PD1 inhibitor, a PD-L1 inhibitor, and a CD3 inhibitor. Optionally, the subject has, or is identified as having, at least 5%, 6%, 7%, 8%, 9%, 10%, 20%, 30%, 40%, 50%, 60%, 70%, 80%, or 90% of cancer cells, e.g., DLBCL cells, which are CD3+/PD1+.

[1036] In some embodiments, the methods herein include a step of assaying cells in a biological sample, e.g., a sample comprising DLBCL cells, for CD3 and/or PD-1 (e.g., CD3 and/or PD-1 expression). In some embodiments, the methods include a step of assaying cells in a biological sample, e.g., a sample comprising DLBCL cells, for CD19 and/or PD-L1 (e.g., CD19 and/or PD-L1 expression). In some embodiments, the methods include, e.g., providing a sample comprising cancer cells and performing a detection step, e.g., by immunohistochemistry, for one or more of CD3, PD-1, CD19, or PD-L1. The methods may comprise a further step of recommending or administering a treatment, e.g., a treatment comprising a CD19 CAR.

[1037] In one embodiment, the anti-PD-1 antibody or fragment thereof is an anti-PD-1 antibody molecule as described in US 2015/0210769, entitled “Antibody Molecules to PD-1 and Uses Thereof,” incorporated by reference in its entirety. In one embodiment, the anti-PD-1 antibody molecule includes at least one, two, three, four, five or six CDRs (or collectively all of the CDRs) from a heavy and light chain variable region from an antibody chosen from any of BAP049-hum01, BAP049-hum02, BAP049-hum03, BAP049-hum04, BAP049-hum05, BAP049-hum06, BAP049-hum07, BAP049-hum08, BAP049-hum09, BAP049-hum10, BAP049-hum11, BAP049-hum12, BAP049-hum13, BAP049-hum14, BAP049-hum15, BAP049-hum16, BAP049-Clone-A, BAP049-Clone-B, BAP049-Clone-C, BAP049-Clone-D, or BAP049-Clone-E; or as described in Table 1 of US 2015/0210769, or encoded by the nucleotide sequence in Table 1, or a sequence substantially identical (e.g., at least 80%, 85%, 90%, 92%, 95%, 97%, 98%, 99% or higher identical) to any of the aforesaid sequences; or closely related CDRs, e.g., CDRs which are identical or which have at least one amino acid alteration, but not more than two, three or four alterations (e.g., substitutions, deletions, or insertions, e.g., conservative substitutions).

[1038] In yet another embodiment, the anti-PD-1 antibody molecule comprises at least one, two, three or four variable regions from an antibody described herein, e.g., an antibody chosen from any of BAP049-hum01, BAP049-hum02, BAP049-hum03, BAP049-hum04, BAP049-hum05, BAP049-hum06, BAP049-hum07, BAP049-hum08, BAP049-hum09, BAP049-hum10, BAP049-hum11, BAP049-hum12, BAP049-hum13, BAP049-hum14, BAP049-hum15, BAP049-hum16, BAP049-Clone-A, BAP049-Clone-B, BAP049-Clone-C, BAP049-Clone-D, or BAP049-Clone-E; or as described in Table 1 of US 2015/0210769, or encoded by the nucleotide sequence in Table 1; or a sequence substantially identical (e.g., at least 80%, 85%, 90%, 92%, 95%, 97%, 98%, 99% or higher identical) to any of the aforesaid sequences.

[1039] In one embodiment of the CD19 CAR therapy-PD1 inhibitor therapy, the PD-1 inhibitor, e.g., pembrolizumab, is administered post-CD19 CAR therapy (e.g., starting 5 days to 4 months, e.g., 10 day to 3 months, e.g., 14 days to 2 months post-CTL019 or post-CTL119 therapy, or post-a combination of CTL019 and CTL119 therapies). In embodiments, administration of the therapy is to a subject with B-ALL, e.g., relapsed or refractory B-ALL.

[1040] In yet another embodiment of the CD19 CAR therapy-PD1 inhibitor therapy, the hematologic cancer is B-ALL, e.g., relapsed or refractory B-ALL.

[1041] In one embodiment, the subject has a hematologic malignancy, e.g., B-ALL, and may not respond to the CAR T therapy or may relapse, e.g., due to poor CAR T cell persistence.

[1042] In one embodiment of the CD19 CAR therapy-PD1 inhibitor therapy, the subject shows an improved therapeutic outcome, e.g., the subject achieves one or more of partial remission, complete remission, or prolonged CAR T cell persistence, in response to the CD19 CAR therapy-PD1 inhibitor therapy, e.g., one or more cycles of the CD19 CAR therapy-PD1 inhibitor therapy.

[1043] In one embodiment of the CD19 CAR therapy-PD1 inhibitor therapy, prior to administration of the PD-1 inhibitor, the subject has relapsed or refractory B-ALL to a prior treatment with a CD19 CAR therapy, e.g., a prior treatment with one or both of CTL019 and CTL119. In some embodiments, the subject shows decreased or poor CAR T cell persistence. In some embodiments, the subject shows CD19+ relapse.

[1044] In some embodiments, the subject, e.g., a subject showing CD19+ relapse after a CD19CAR therapy, is administered a further CD19 CAR therapy, in combination with the PD-1 inhibitor, e.g., pembrolizumab. In embodiments, the further administration of the combination therapy results in an improved therapeutic outcome, e.g., the subject achieves one or more of partial remission, complete remission, or a prolonged CAR T cell persistence.

[1045] TIM3 (T cell immunoglobulin-3) also negatively regulates T cell function, particularly in IFN-g-secreting CD4+T helper 1 and CD8+T cytotoxic 1 cells, and plays a critical role in T cell exhaustion. Inhibition of the interaction between TIM3 and its ligands, e.g., galectin-9 (Gal9), phosphatidylserine (PS), and HMGB1, can increase immune response. Antibodies, antibody fragments, and other inhibitors of TIM3 and its ligands are available in the art and may be used combination with a CD19 CAR described herein. For example, antibodies, antibody fragments, small molecules, or peptide inhibitors that target TIM3 binds to the IgV domain of TIM3 to inhibit interaction with its ligands. Antibodies and peptides that inhibit TIM3 are disclosed in WO2013/006490 and US20100247521. Other anti-TIM3 antibodies include humanized versions of RMT3-23 (disclosed in Ngiow et al., 2011, Cancer Res, 71:3540-3551), and clone 8B.2C12 (disclosed in Monney et al., 2002, Nature, 415:536-541). Bi-specific antibodies that inhibit TIM3 and PD-1 are disclosed in US20130156774.

[1046] In one embodiment, the anti-TIM3 antibody or fragment thereof is an anti-TIM3 antibody molecule as described in US 2015/0218274, entitled “Antibody Molecules to TIM3 and Uses Thereof,” incorporated by reference in its entirety. In one embodiment, the anti-TIM3 antibody molecule includes at least one, two, three, four, five or six CDRs (or collectively all of the CDRs) from a heavy and light chain variable region from an antibody chosen from any of ABTIM3, ABTIM3-hum01, ABTIM3-hum02, ABTIM3-hum03, ABTIM3-hum04, ABTIM3-hum05, ABTIM3-hum06, ABTIM3-hum07, ABTIM3-hum08, ABTIM3-hum09, ABTIM3-hum10, ABTIM3-hum11, ABTIM3-hum12, ABTIM3-hum13, ABTIM3-hum14, ABTIM3-hum15, ABTIM3-hum16, ABTIM3-hum17, ABTIM3-hum18, ABTIM3-hum19, ABTIM3-hum20, ABTIM3-hum21, ABTIM3-hum22, ABTIM3-hum23; or as described in Tables 1-4 of US 2015/0218274; or encoded by the nucleotide sequence in Tables 1-4; or a sequence substantially identical (e.g., at least 80%, 85%, 90%, 92%, 95%, 97%, 98%, 99% or higher identical) to any of the aforesaid sequences, or closely related CDRs, e.g., CDRs which are identical or which have at least one amino acid alteration, but not more than two, three or four alterations (e.g., substitutions, deletions, or insertions, e.g., conservative substitutions).

[1047] In yet another embodiment, the anti-TIM3 antibody molecule comprises at least one, two, three or four variable regions from an antibody described herein, e.g., an antibody chosen from any of ABTIM3, ABTIM3-hum01, ABTIM3-hum02, ABTIM3-hum03, ABTIM3-hum04, ABTIM3-hum05, ABTIM3-hum06, ABTIM3-hum07, ABTIM3-hum08, ABTIM3-hum09, ABTIM3-hum10, ABTIM3-hum11, ABTIM3-hum12, ABTIM3-hum13, ABTIM3-hum14, ABTIM3-hum15, ABTIM3-hum16, ABTIM3-hum17, ABTIM3-hum18, ABTIM3-hum19, ABTIM3-hum20, ABTIM3-hum21, ABTIM3-hum22, ABTIM3-hum23; or as described in Tables 1-4 of US 2015/0218274; or encoded by the nucleotide sequence in Tables 1-4; or a sequence substantially identical (e.g., at least 80%, 85%, 90%, 92%, 95%, 97%, 98%, 99% or higher identical) to any of the aforesaid sequences.

[1048] In other embodiments, the agent which enhances the activity of a CAR-expressing cell is a CEACAM inhibitor (e.g., CEACAM-1, CEACAM-3, and/or CEACAM-5 inhibitor). In one embodiment, the inhibitor of CEACAM is an anti-CEACAM antibody molecule. Exemplary anti-CEACAM-1 antibodies are described in WO 2010/125571, WO 2013/082366 WO 2014/059251 and WO 2014/022332, e.g., a monoclonal antibody 34B1, 26H7, and 5F4; or a recombinant form thereof, as described in, e.g., US 2004/0047858, U.S. Pat. No. 7,132,255 and WO 99/052552. In other embodiments, the anti-CEACAM antibody binds to CEACAM-5 as described in, e.g., Zheng et al. PLoS One. 2010 Sep. 2; 5(9). pii: e12529 (DOI:10:1371/journal.pone.0021146), or crossreacts with CEACAM-1 and CEACAM-5 as described in, e.g., WO 2013/054331 and US 2014/0271618.

[1049] Without wishing to be bound by theory, carcinoembryonic antigen cell adhesion molecules (CEACAM), such as CEACAM-1 and CEACAM-5, are believed to mediate, at least in part, inhibition of an anti-tumor immune response (see e.g., Markel et al. J Immunol. 2002 Mar. 15; 168(6):2803-10; Markel et al. J Immunol. 2006 Nov. 1; 177(9):6062-71; Markel et al. Immunology. 2009 February; 126(2):186-200; Markel et al. Cancer Immunol Immunother. 2010 February; 59(2):215-30; Ortenberg et al. Mol Cancer Ther. 2012 June; 11(6):1300-10; Stern et al. J Immunol. 2005 Jun. 1; 174(11):6692-701; Zheng et al. PLoS One. 2010 Sep. 2; 5(9). pii: e12529). For example, CEACAM-1 has been described as a heterophilic ligand for TIM-3 and as playing a role in TIM-3-mediated T cell tolerance and exhaustion (see e.g., WO 2014/022332; Huang, et al. (2014) Nature doi:10.1038/nature13848). In embodiments, co-blockade of CEACAM-1 and TIM-3 has been shown to enhance an anti-tumor immune response in xenograft colorectal cancer models (see e.g., WO 2014/022332; Huang, et al. (2014), supra). In other embodiments, co-blockade of CEACAM-1 and PD-1 reduce T cell tolerance as described, e.g., in WO 2014/059251. Thus, CEACAM inhibitors can be used with the other immunomodulators described herein (e.g., anti-PD-1 and/or anti-TIM-3 inhibitors) to enhance an immune response against a cancer, e.g., a melanoma, a lung cancer (e.g., NSCLC), a bladder cancer, a colon cancer, an ovarian cancer, and other cancers as described herein.

[1050] LAG3 (lymphocyte activation gene-3 or CD223) is a cell surface molecule expressed on activated T cells and B cells that has been shown to play a role in CD8+ T cell exhaustion. Antibodies, antibody fragments, and other inhibitors of LAG3 and its ligands are available in the art and may be used combination with a CD19 CAR described herein. For example, BMS-986016 (Bristol-Myers Squib) is a monoclonal antibody that targets LAG3. IMP701 (Immutep) is an antagonist LAG3 antibody and IMP731 (Immutep and GlaxoSmithKline) is a depleting LAG3 antibody. Other LAG3 inhibitors include IMP321 (Immutep), which is a recombinant fusion protein of a soluble portion of LAG3 and Ig that binds to MHC class II molecules and activates antigen presenting cells (APC). Other antibodies are disclosed, e.g., in WO2010/019570.

[1051] In one embodiment, the anti-LAG3 antibody or fragment thereof is an anti-LAG3 antibody molecule as described in US 2015/0259420, entitled “Antibody Molecules to LAG3 and Uses Thereof,” incorporated by reference in its entirety. In one embodiment, the anti-LAG3 antibody molecule includes at least one, two, three, four, five or six CDRs (or collectively all of the CDRs) from a heavy and light chain variable region from an antibody chosen from any of BAP050-hum01, BAP050-hum02, BAP050-hum03, BAP050-hum04, BAP050-hum05, BAP050-hum06, BAP050-hum07, BAP050-hum08, BAP050-hum09, BAP050-hum10, BAP050-hum11, BAP050-hum12, BAP050-hum13, BAP050-hum14, BAP050-hum15, BAP050-hum16, BAP050-hum17, BAP050-hum18, BAP050-hum19, BAP050-hum20, huBAP050(Ser) (e.g., BAP050-hum01-Ser, BAP050-hum02-Ser, BAP050-hum03-Ser, BAP050-hum04-Ser, BAP050-hum05-Ser, BAP050-hum06-Ser, BAP050-hum07-Ser, BAP050-hum08-Ser, BAP050-hum09-Ser, BAP050-hum10-Ser, BAP050-hum11-Ser, BAP050-hum12-Ser, BAP050-hum13-Ser, BAP050-hum14-Ser, BAP050-hum15-Ser, BAP050-hum18-Ser, BAP050-hum19-Ser, or BAP050-hum20-Ser), BAP050-Clone-F, BAP050-Clone-G, BAP050-Clone-H, BAP050-Clone-I, or BAP050-Clone-J; or as described in Table 1 of US 2015/0259420; or encoded by the nucleotide sequence in Table 1; or a sequence substantially identical (e.g., at least 80%, 85%, 90%, 92%, 95%, 97%, 98%, 99% or higher identical) to any of the aforesaid sequences, or closely related CDRs, e.g., CDRs which are identical or which have at least one amino acid alteration, but not more than two, three or four alterations (e.g., substitutions, deletions, or insertions, e.g., conservative substitutions).

[1052] In yet another embodiment, the anti-LAG3 antibody molecule comprises at least one, two, three or four variable regions from an antibody described herein, e.g., an antibody chosen from any of BAP050-hum01, BAP050-hum02, BAP050-hum03, BAP050-hum04, BAP050-hum05, BAP050-hum06, BAP050-hum07, BAP050-hum08, BAP050-hum09, BAP050-hum10, BAP050-hum11, BAP050-hum12, BAP050-hum13, BAP050-hum14, BAP050-hum15, BAP050-hum16, BAP050-hum17, BAP050-hum18, BAP050-hum19, BAP050-hum20, huBAP050(Ser) (e.g., BAP050-hum01-Ser, BAP050-hum02-Ser, BAP050-hum03-Ser, BAP050-hum04-Ser, BAP050-hum05-Ser, BAP050-hum06-Ser, BAP050-hum07-Ser, BAP050-hum08-Ser, BAP050-hum09-Ser, BAP050-hum10-Ser, BAP050-hum11-Ser, BAP050-hum12-Ser, BAP050-hum13-Ser, BAP050-hum14-Ser, BAP050-hum15-Ser, BAP050-hum18-Ser, BAP050-hum19-Ser, or BAP050-hum20-Ser), BAP050-Clone-F, BAP050-Clone-G, BAP050-Clone-H, BAP050-Clone-I, or BAP050-Clone-J; or as described in Table 1 of US 2015/0259420; or encoded by the nucleotide sequence in Tables 1; or a sequence substantially identical (e.g., at least 80%, 85%, 90%, 92%, 95%, 97%, 98%, 99% or higher identical) to any of the aforesaid sequences.

[1053] In embodiments, the subject is administered an additional agent (in further combination with a CAR-expressing cell, e.g., a CD19 CAR-expressing cell), where the additional agent is an inhibitor of an inhibitory molecule, e.g., checkpoint molecule, e.g., PD-1, PD-L1, CTLA4, TIM3, CEACAM (e.g., CEACAM-1, CEACAM-3 and/or CEACAM-5), LAGS, VISTA, BTLA, TIGIT, LAIR1, CD160, 2B4, CD80, CD86, B7-H3 (CD276), B7-H4 (VTCN1), HVEM (TNFRSF14 or CD270), KIR, A2aR, MHC class I, MHC class II, GALS, adenosine, or TGF beta. In embodiments, the additional agent is an inhibitor of PD-L1, e.g., FAZ053 (a hIgG4 humanized anti-PD-L1 monoclonal antibody), MPDL3280A, durvalumab (DEMI-4736), avelumab (MSB-0010718C), or BMS-936559. In embodiments, the additional agent is an additional inhibitor of PD-1, e.g., pembrolizumab, nivolumab, PDR001, MEDI-0680 (AMP-514), AMP-224, REGN-2810, or BGB-A317. In embodiments, the additional agent is an inhibitor of CTLA-4, e.g., ipilimumab. In embodiments, the additional agent is an inhibitor of LAG-3, e.g., LAG525 (a hIgG4 humanized anti-LAG-3 monoclonal antibody). In embodiments, the additional agent is an inhibitor of TIM-3, e.g., MBG453 (a hIgG4 humanized anti-TIM-3 monoclonal antibody). In embodiments, the additional agent is an inhibitor of the enzyme, B-Raf, e.g., dabrafenib (GSK2118436; N-{3-[5-(2-aminopyrimidin-4-yl)-2-tert-butyl-1,3-thiazol-4-yl]-2-fluorophenyl}-2,6-difluorobenzenesulfonamide). In embodiments, the additional agent is an inhibitor of MEK1 and/or MEK2, e.g., trametinib (N-(3-{3-Cyclopropyl-5-[(2-fluoro-4-iodophenyl)amino]-6,8-dimethyl-2,4,7-trioxo-3,4,6,7-tetrahydropyrido[4,3-d]pyrimidin-1(2H)-yl}phenyl)acetamide). In embodiments, the additional agent comprises dabrafenib and trametinib. In embodiments, the additional agent is an inhibitor of GITR, e.g., GWN323. In embodiments, the additional agent is an agonist of STING (Stimulator of Interferon Genes), e.g., MIW815. In embodiments, the additional agent is an IL-15 agonist, e.g., NIZ985. In embodiments, the additional agent an inhibitor of adenosine receptor, e.g., NIR178. In embodiments, the additional agent is an inhibitor of macrophage colony stimulating factor (CSF-1), e.g., MCS110. In embodiments, the additional agent is an inhibitor of cMet, e.g., INC280. In embodiments, the additional agent is an inhibitor of porcupine (PORCN), e.g., WNT974. In embodiments, the additional agent is a histone deacetylase inhibitor, e.g., panobinost. In embodiments, the additional agent is an mTOR inhibitor, e.g., everolimus. In embodiments, the additional agent is a second mitochondrial-derived activator of caspases (SMAC) mimetic and/or an inhibitor of IAP (inhibiotor of apoptosis protein) family of proteins, e.g., LCL161. In embodiments, the additional agent is an inhibitor epidermal growth factor receptor (EGFR), e.g., EGF816. In embodiments, the additional agent is an inhibitor of IL-17, e.g., CJM112. In embodiments, the additional agent is an inhibitor of IL-1beta, e.g., ILARIS.

[1054] While not wishing to be bound by theory, in some embodiments, a tumor microenvironment is not conducive to CART cells attacking cancer cells, due to direct or indirect inhibitory effects exerted by the presence of PD-L1+ expressing cells or PD1+ T cells within the tumor microenvironment. More specifically, a tumor microenvironment can comprise tumor cells (which are generally CD19+), immune effector cells (which can be CD3+ T cells and can be PD1+ or PD1−, and which can be endogenous cells or CAR-expressing cells), and activated myeloid cells (which are generally PD-L1+). PD1+ T cells can create a “barrier” around the tumor microenvironment by preventing entry of CART cells the tumor. According to the non-limiting theory herein, pre-administration of a PD1 inhibitor and/or PD-L1 inhibitor makes the tumor microenvironment more favorable to entry of CAR-expressing cells into the tumor microenvironment and effectively clear the target positive cancer cells.

[1055] Accordingly, in certain aspects, the present disclosure provides methods of combination therapy comprising administering to a subject a cell that expresses a CAR molecule that binds CD19, e.g., a CD19 CAR, in combination with a PD1 inhibitor, a PD-L1 inhibitor, or both. In some embodiments, the PD1 inhibitor and/or PD-L1 inhibitor is administered before the CAR therapy. In other embodiments, the PD1 inhibitor and/or PD-L1 inhibitor is administered concurrently with or after the CAR therapy. In some aspects, the subject is a subject having a disease associated with expression of CD19, e.g., a hematologic malignancy, e.g., a leukemia or lymphoma, e.g., DLBCL, e.g. primary DLBCL. In some embodiments, the patient has, or is identified as having, elevated levels of PD1, PDL1, or CD3, or any combination thereof. In some embodiments, the patient has, or is identified as having, or at least 5%, 6%, 7%, 8%, 9%, 10%, 20%, 30%, 40%, 50%, 60%, 70%, 80%, or 90% of DLBCL cells which are positive for CD3 and PD1.

[1056] Also provided herein are methods for monitoring the efficacy of a CAR therapy, e.g., a CD19 CAR therapy. CAR-expressing cells can be administered to a patient's bloodstream with the intent that the cells home to a tumor cell, e.g., infiltrate a tumor. Accordingly, in some embodiments, the method comprises assaying a tumor sample for the presence of CAR-expressing cells. In embodiments, the method comprises detecting a tumor marker, e.g., CD19. In embodiments, the method comprises detecting a marker of a CAR-expressing cell, e.g., a CAR construct or nucleic acid encoding the CAR construct. In embodiments, the method further comprises detecting a T cell marker, e.g., CD3. In some aspects, the subject is a subject having a disease associated with expression of CD19, e.g., a hematologic malignancy, e.g., a leukemia or lymphoma, e.g., DLBCL, e.g. primary DLBCL. In some embodiments, if the CAR-expressing cells show poor infiltration of the tumor, the subject is identified as at an elevated risk of relapse compared to a subject with good infiltration of the tumor. In some embodiments, if the CAR-expressing cells show poor infiltration of the tumor, the subject is administered a PD1 inhibitor and/or PD-L1 inhibitor, e.g., in combination with a second dose of CAR-expressing cells.

[1057] In some embodiments, the agent which enhances the activity of a CAR-expressing cell can be, e.g., a fusion protein comprising a first domain and a second domain, wherein the first domain is an inhibitory molecule, or fragment thereof, and the second domain is a polypeptide that is associated with a positive signal, e.g., a polypeptide comprising an intracellular signaling domain as described herein. In some embodiments, the polypeptide that is associated with a positive signal can include a costimulatory domain of CD28, CD27, ICOS, e.g., an intracellular signaling domain of CD28, CD27 and/or ICOS, and/or a primary signaling domain, e.g., of CD3 zeta, e.g., described herein. In one embodiment, the fusion protein is expressed by the same cell that expressed the CAR. In another embodiment, the fusion protein is expressed by a cell, e.g., a T cell that does not express an anti-CD19 CAR.

[1058] In an embodiment, the method further comprises administering a checkpoint inhibitor. In embodiments, the subject receives a pre-treatment of with an agent, e.g., an mTOR inhibitor, and/or a checkpoint inhibitor, prior to the initiation of a CART therapy. In embodiments, the subject receives concurrent treatment with an agent, e.g., an mTOR inhibitor, and/or a checkpoint inhibitor. In embodiments, the subject receives treatment with an agent, e.g., an mTOR inhibitor, and/or a checkpoint inhibitor, post-CART therapy.

[1059] In embodiments, the determined level or determined characteristic is acquired before, at the same time, or during a course of CART therapy.

[1060] In one embodiment, the agent which enhances activity of a CAR-expressing cell described herein is miR-17-92.

[1061] In one embodiment, the agent which enhances activity of a CAR-described herein is a cytokine. Cytokines have important functions related to T cell expansion, differentiation, survival, and homeostasis. Cytokines that can be administered to the subject receiving a CAR-expressing cell described herein include: IL-2, IL-4, IL-7, IL-9, IL-15, IL-18, and IL-21, or a combination thereof. In embodiments, the cytokine administered is IL-7, IL-15, or IL-21, or a combination thereof. The cytokine can be administered once a day or more than once a day, e.g., twice a day, three times a day, or four times a day. The cytokine can be administered for more than one day, e.g. the cytokine is administered for 2 days, 3 days, 4 days, 5 days, 6 days, 1 week, 2 weeks, 3 weeks, or 4 weeks. For example, the cytokine is administered once a day for 7 days.

[1062] In embodiments, the cytokine is administered in combination with CAR-expressing cells. The cytokine can be administered simultaneously or concurrently with the CAR-expressing cells, e.g., administered on the same day. The cytokine may be prepared in the same pharmaceutical composition as the CAR-expressing cells, or may be prepared in a separate pharmaceutical composition. Alternatively, the cytokine can be administered shortly after administration of the CAR-expressing T cells, e.g., 1 day, 2 days, 3 days, 4 days, 5 days, 6 days, or 7 days after administration of the CAR-expressing cells. In embodiments where the cytokine is administered in a dosing regimen that occurs over more than one day, the first day of the cytokine dosing regimen can be on the same day as administration with the CAR-expressing cells, or the first day of the cytokine dosing regimen can be 1 day, 2 days, 3 days, 4 days, 5 days, 6 days, or 7 days after administration of the CAR-expressing T cells. In one embodiment, on the first day, the CAR-expressing cells are administered to the subject, and on the second day, a cytokine is administered once a day for the next 7 days. In an embodiment, the cytokine to be administered in combination with the CAR-expressing cells is IL-7, IL-15, and/or IL-21.

[1063] In other embodiments, the cytokine is administered a sufficient period of time after administration of the CAR-expressing cells, e.g., at least 2 weeks, 3 weeks, 4 weeks, 6 weeks, 8 weeks, 10 weeks, 12 weeks, 4 months, 5 months, 6 months, 7 months, 8 months, 9 months, 10 months, 11 months, or 1 year or more after administration of CAR-expressing cells. In one embodiment, the cytokine is administered after assessment of the subject's response to the CAR-expressing cells. For example, the subject is administered CAR-expressing cells according to the dosage and regimens described herein. The response of the subject to CART therapy is assessed at 2 weeks, 3 weeks, 4 weeks, 6 weeks, 8 weeks, 10 weeks, 12 weeks, 4 months, 5 months, 6 months, 7 months, 8 months, 9 months, 10 months, 11 months, or 1 year or more after administration of CAR-expressing cells, using any of the methods described herein, including inhibition of tumor growth, reduction of circulating tumor cells, or tumor regression. Subjects that do not exhibit a sufficient response to CART therapy can be administered a cytokine. Administration of the cytokine to the subject that has sub-optimal response to the CART therapy improves CART efficacy and/or anti-tumor activity. In an embodiment, the cytokine administered after administration of CAR-expressing cells is IL-7.

[1064] The structure of the active compounds identified by code numbers, generic or trade names may be taken from the actual edition of the standard compendium “The Merck Index” or from databases, e.g. Patents International (e.g. IMS World Publications).

[1065] The above-mentioned compounds, which can be used in combination with a compound of the present invention, can be prepared and administered as described in the art, such as in the documents cited above.

[1066] In one embodiment, the present invention provides pharmaceutical compositions comprising at least one compound of the present invention (e.g., a compound of the present invention) or a pharmaceutically acceptable salt thereof together with a pharmaceutically acceptable carrier suitable for administration to a human or animal subject, either alone or together with other anti-cancer agents.

[1067] In one embodiment, the present invention provides methods of treating human or animal subjects suffering from a cellular proliferative disease, such as cancer. The present invention provides methods of treating a human or animal subject in need of such treatment, comprising administering to the subject a therapeutically effective amount of a compound of the present invention (e.g., a compound of the present invention) or a pharmaceutically acceptable salt thereof, either alone or in combination with other anti-cancer agents.

[1068] In particular, compositions will either be formulated together as a combination therapeutic or administered separately.

[1069] In combination therapy, the compound of the present invention and other anti-cancer agent(s) may be administered either simultaneously, concurrently or sequentially with no specific time limits, wherein such administration provides therapeutically effective levels of the two compounds in the body of the patient.

[1070] In a embodiment, the compound of the present invention and the other anti-cancer agent(s) is generally administered sequentially in any order by infusion or orally. The dosing regimen may vary depending upon the stage of the disease, physical fitness of the patient, safety profiles of the individual drugs, and tolerance of the individual drugs, as well as other criteria well-known to the attending physician and medical practitioner(s) administering the combination. The compound of the present invention and other anti-cancer agent(s) may be administered within minutes of each other, hours, days, or even weeks apart depending upon the particular cycle being used for treatment. In addition, the cycle could include administration of one drug more often than the other during the treatment cycle and at different doses per administration of the drug.

[1071] In another aspect of the present invention, kits that include one or more compound of the present invention and a combination partner as disclosed herein are provided. Representative kits include (a) a compound of the present invention or a pharmaceutically acceptable salt thereof, (b) at least one combination partner, e.g., as indicated above, whereby such kit may comprise a package insert or other labeling including directions for administration.

[1072] A compound of the present invention may also be used to advantage in combination with known therapeutic processes, for example, the administration of hormones or especially radiation. A compound of the present invention may in particular be used as a radiosensitizer, especially for the treatment of tumors which exhibit poor sensitivity to radiotherapy.

Combination with a Low, Immune Enhancing, Dose of an mTOR Inhibitor

[1073] Methods described herein use low, immune enhancing, doses of mTOR inhibitors, e.g., allosteric mTOR inhibitors, including rapalogs such as RAD001. Administration of a low, immune enhancing, dose of an mTOR inhibitor (e.g., a dose that is insufficient to completely suppress the immune system, but sufficient to improve immune function) can optimize the performance of immune effector cells, e.g., T cells or CAR-expressing cells, in the subject. Methods for measuring mTOR inhibition, dosages, treatment regimens, and suitable pharmaceutical compositions are described in U.S. Patent Application No. 2015/0140036, hereby incorporated by reference.

### Methods and Biomarkers for Evaluating CAR-Effectiveness or Sample Suitability

[1074] The present disclosure provides, among other things, gene signatures that indicate whether a cancer patient treated with a CAR therapy is likely to relapse, or has relapsed. Without wishing to be bound by theory, an experimental basis for this gene signature is set out in Example 12 on pages 528-532 of International Application WO 2016/164731, filed Apr. 8, 2016, which is incorporated by reference in its entirety.

[1075] In an embodiment, novel transcriptional gene signatures described e.g., in Table 29 (on page 530 International Application WO 2016/164731, filed Apr. 8, 2016, which is incorporated by reference in its entirety), are used to enable manufactured product improvements, thereby reducing the likelihood of patient relapse. In an embodiment, gene signatures described herein are used to modify therapeutic application of manufactured product, thereby reducing the likelihood of patient relapse.

[1076] In an embodiment, gene signatures described e.g., in Table 29 (on page 530 International Application WO 2016/164731, filed Apr. 8, 2016, which is incorporated by reference in its entirety) are identified in a subject prior to treatment with a CAR-expressing cell, e.g., CART treatment (e.g., a CART19 treatment, e.g., CTL019 therapy) that predict relapse to CAR treatment. In an embodiment, gene signatures described herein are identified in an apheresis sample or bone marrow sample. In an embodiment, gene signatures described herein are identified in a manufactured CAR-expressing cell product, e.g., CART product (e.g., a CART19 product, e.g., CTL019) prior to infusion.

[1077] In embodiments, a method of using the compositions described herein comprises assaying a gene signature that indicates whether a subject treated with the cell is likely to relapse, or has relapsed. In embodiments, the method comprises assaying the gene signature in the cell prior to infusion into the subject. In embodiments, the method further comprises decreasing the T_{REG} signature of a population of cells comprising the transduced cell. In embodiments, decreasing the T_{REG} signature comprises performing CD25-depletion on the population of cells.

[1078] In embodiments, a method comprises assaying a gene signature that indicates whether the subject is likely to relapse, or has relapsed. In embodiments, the method comprises assaying a gene signature in a subject prior to treatment with a CAR-expressing cell, e.g., CART treatment (e.g., a CART19 treatment, e.g., CTL019 therapy) that predicts relapse to CAR treatment. In embodiments, the level of one or more markers is the level of at least 2, 3, 4, 5, 6, 7, 8, 9, or 10 markers listed in Table 29 (on page 530 International Application WO 2016/164731, filed Apr. 8, 2016, which is incorporated by reference in its entirety). In embodiments, the level of the marker comprises an mRNA level or a level of a soluble protein.

[1079] This disclosure also provides evidence, for instance in Example 12, on pages 528-532 of International Application WO 2016/164731, filed Apr. 8, 2016, which is incorporated by reference in its entirety, that (without wishing to be bound by theory) decreasing the T_{REG} signature in the patient prior to apheresis or during manufacturing of the CART product reduces the risk of patient relapse.

[1080] In an embodiment, a patient is pre-treated with one or more therapies that reduce T_{REG} cells prior to collection of cells for CAR product manufacturing, e.g., CART product manufacturing, thereby reducing the risk of patient relapse to CAR-expressing cell treatment (e.g., CTL019 treatment). Methods of decreasing T_{REG} cells include, but are not limited to, cyclophosphamide, anti-GITR antibody, CD25-depletion, and combinations thereof.

[1081] In an embodiment, a patient is pre-treated with cyclophosphamide or an anti-GITR antibody prior to collection of cells for CAR-expressing cell product manufacturing, thereby reducing the risk of patient relapse to CAR-expressing cell treatment (e.g., CTL019 treatment).

[1082] In an embodiment, the CAR-expressing cell manufacturing process is modified to deplete T_{REG} cells prior to manufacturing of the CAR-expressing cell product (e.g., a CTL019 product). In an embodiment, CD25-depletion is used to deplete T_{REG} cells prior to manufacturing of the CAR-expressing cell product (e.g., a CTL019 product).

[1083] In an embodiment, after treating a patient or a CAR-expressing cell product with a treatment that reduces T_{REG} cells, the patient is treated with a combination therapy. The combination therapy may comprise, e.g., a CD19 inhibitor such as a CD19 CAR-expressing cell.

[1084] In an embodiment, a patient is assayed for the level of T_{REG} cells in a patient sample, e.g., a sample comprising cancer cells and/or a sample representing a tumor microenvironment. In an embodiment, this information is used to determine a course of treatment for the patient. For instance, in an embodiment, if the patient is identified as having elevated levels of T_{REG} cells compared to a control, the therapy comprises administering a treatment other than a CAR-expressing cell. For instance, the therapy may comprise administration of an antibody molecule, administration of a small molecule therapeutic, surgery, or radiation therapy, or any combination thereof. This therapy may target one or more B-cell antigens.

[1085] In embodiments, the characteristic of CD19 is a mutation in exon 2, e.g., a mutation causing a frameshift or a premature stop codon or both. In embodiments, the level of T_{REG} cells is determined by staining a sample for a marker expressed by T_{REG} cells. In embodiments, the level of T_{REG} cells is the level of Treg cells in a relevant location in the subject's body, e.g., in a cancer microenvironment.

[1086] In an embodiment, a relapser is a patient having, or who is identified as having, an increased level of expression (e.g., increase in RNA levels) of one or more of (e.g., 2, 3, 4, or all of) the following genes, compared to non relapsers: MIR199A1, MIR1203, uc021ovp, ITM2C, and HLA-DQB1 and/or a decreased levels of expression (e.g., decrease in RNA levels) of one or more of (e.g., 2, 3, 4, 5, 6, 7, 8, 9, 10, 11, or all of) the following genes, compared to non relapsers: PPIAL4D, TTTY10, TXLNG2P, MIR4650-1, KDM5D, USP9Y, PRKY, RPS4Y2, RPS4Y1, NCRNA00185, SULT1E1, and EIF1AY.

[1087] In another aspect, the invention features a method of evaluating or monitoring the effectiveness of a CAR-expressing cell therapy, in a subject (e.g., a subject having a cancer), or the suitability of a sample (e.g., an apheresis sample) for a CAR therapy, e.g., therapy including administration of a low, immune-enhancing dose of an mTOR inhibitor. The method includes acquiring a value of effectiveness to the CAR therapy, or sample suitability, wherein said value is indicative of the effectiveness or suitability of the CAR-expressing cell therapy.

[1088] In embodiments, the value of effectiveness to the CAR therapy, or sample suitability, comprises a measure of one, two, three, four, five, six or more (all) of the following:
[1089] (i) the level or activity of one, two, three, or more (e.g., all) of resting T_{EFF} cells, resting T_{REG} cells, younger T cells (e.g., younger CD4 or CD8 cells, or gamma/delta T cells), or early memory T cells, or a combination thereof, in a sample (e.g., an apheresis sample or a manufactured CAR-expressing cell product sample);
[1090] (ii) the level or activity of one, two, three, or more (e.g., all) of activated T_{EFF} cells, activated T_{REG} cells, older T cells (e.g., older CD4 or CD8 cells), or late memory T cells, or a combination thereof, in a sample (e.g., an apheresis sample or a manufactured CAR-expressing cell product sample);
[1091] (iii) the level or activity of an immune cell exhaustion marker, e.g., one, two or more immune checkpoint inhibitors (e.g., PD-1, PD-L1, TIM-3 and/or LAG-3) in a sample (e.g., an apheresis sample or a manufactured CAR-expressing cell product sample). In one embodiment, an immune cell has an exhausted phenotype, e.g., co-expresses at least two exhaustion markers, e.g., co-expresses PD-1 and TIM-3. In other embodiments, an immune cell has an exhausted phenotype, e.g., co-expresses at least two exhaustion markers, e.g., co-expresses PD-1 and LAG-3;
[1092] (iv) the level or activity of CD27 and/or CD45RO− (e.g., CD27+CD45RO−) immune effector cells, e.g., in a CD4+ or a CD8+ T cell population, in a sample (e.g., an apheresis sample or a manufactured CAR-expressing cell product sample);
[1093] (v) the level or activity of one, two, three, four, five, ten, twelve or more of the biomarkers chosen from CCL20, IL-17a and/or IL-6, PD-1, PD-L1, LAG-3, TIM-3, CD57, CD27, CD122, CD62L, KLRG1;
[1094] (vi) a cytokine level or activity (e.g., quality of cytokine repertoire) in a CAR-expressing cell product sample; or
[1095] (vii) a transduction efficiency of a CAR-expressing cell in a manufactured CAR-expressing cell product sample.

[1096] In some embodiments of any of the methods disclosed herein, the CAR-expressing cell therapy comprises a plurality (e.g., a population) of CAR-expressing immune effector cells, e.g., a plurality (e.g., a population) of T cells or NK cells, or a combination thereof. In one embodiment, the CAR-expressing cell therapy includes administration of a low, immune-enhancing dose of an mTOR inhibitor.

[1097] In some embodiments of any of the methods disclosed herein, the measure of one or more of (i)-(vii) is obtained from an apheresis sample acquired from the subject. The apheresis sample can be evaluated prior to infusion or re-infusion.

[1098] In some embodiments of any of the methods disclosed herein, the measure of one or more of (i)-(vii) is obtained from a manufactured CAR-expressing cell product sample. The manufactured CAR-expressing cell product can be evaluated prior to infusion or re-infusion.

[1099] In some embodiments of any of the methods disclosed herein, the subject is evaluated prior to receiving, during, or after receiving, the CAR-expressing cell therapy.

[1100] In some embodiments of any of the methods disclosed herein, the measure of one or more of (i)-(vii) evaluates a profile for one or more of gene expression, flow cytometry or protein expression.

[1101] In some embodiments of any of the methods disclosed herein, the method further comprises identifying the subject as a responder, a non-responder, a relapser or a non-relapser, based on a measure of one or more of (i)-(vii).

[1102] In some embodiments of any of the methods disclosed herein, a responder (e.g., a complete responder) has, or is identified as having, a greater level or activity of one, two, or more (all) of GZMK, PPF1BP2, or naïve T cells as compared to a non-responder.

[1103] In some embodiments of any of the methods disclosed herein, a non-responder has, or is identified as having, a greater level or activity of one, two, three, four, five, six, seven, or more (e.g., all) of IL22, IL-2RA, IL-21, IRF8, IL8, CCL17, CCL22, effector T cells, or regulatory T cells, as compared to a responder.

[1104] In an embodiment, a relapser is a patient having, or who is identified as having, an increased level of expression of one or more of (e.g., 2, 3, 4, or all of) the following genes, compared to non relapsers: MIR199A1, MIR1203, uc021ovp, ITM2C, and HLA-DQB1 and/or a decreased levels of expression of one or more of (e.g., 2, 3, 4, 5, 6, 7, 8, 9, 10, 11, or all of) the following genes, compared to non relapsers: PPIAL4D, TTTY10, TXLNG2P, MIR4650-1, KDM5D, USP9Y, PRKY, RPS4Y2, RPS4Y1, NCRNA00185, SULT1E1, and EIF1AY.

[1105] In some embodiments of any of the methods disclosed herein, a complete responder has, or is identified as having, a greater, e.g., a statistically significant greater, percentage of CD8+ T cells compared to a reference value, e.g., a non-responder percentage of CD8+ T cells.

[1106] In some embodiments of any of the methods disclosed herein, a complete responder has, or is identified as having, a greater percentage of CD27+CD45RO− immune effector cells, e.g., in the CD8+ population, compared to a reference value, e.g., a non-responder number of CD27+CD45RO− immune effector cells.

[1107] In some embodiments of any of the methods disclosed herein, a complete responder or a partial responder has, or is identified as having, a greater, e.g., a statistically significant greater, percentage of CD4+ T cells compared to a reference value, e.g., a non-responder percentage of CD4+ T cells.

[1108] In some embodiments of any of the methods disclosed herein, a complete responder has, or is identified as having, a greater percentage of one, two, three, or more (e.g., all) of resting T_{EFF} cells, resting T_{REG} cells, younger T cells (e.g., younger CD4 or CD8 cells, or gamma/delta T cells), or early memory T cells, or a combination thereof, compared to a reference value, e.g., a non-responder number of resting T_{EFF} cells, resting T_{REG} cells, younger T cells (e.g., younger CD4 or CD8 cells), or early memory T cells.

[1109] In some embodiments of any of the methods disclosed herein, a non-responder has, or is identified as having, a greater percentage of one, two, three, or more (e.g., all) of activated T_{EFF} cells, activated T_{REG} cells, older T cells (e.g., older CD4 or CD8 cells), or late memory T cells, or a combination thereof, compared to a reference value, e.g., a responder number of activated T_{EFF} cells, activated T_{REG} cells, older T cells (e.g., older CD4 or CD8 cells), or late memory T cells.

[1110] In some embodiments of any of the methods disclosed herein, a non-responder has, or is identified as having, a greater percentage of an immune cell exhaustion marker, e.g., one, two or more immune checkpoint inhibitors (e.g., PD-1, PD-L1, TIM-3 and/or LAG-3). In one embodiment, a non-responder has, or is identified as having, a greater percentage of PD-1, PD-L1, or LAG-3 expressing immune effector cells (e.g., CD4+ T cells and/or CD8+ T cells) (e.g., CAR-expressing CD4+ cells and/or CD8+ T cells) compared to the percentage of PD-1 or LAG-3 expressing immune effector cells from a responder.

[1111] In one embodiment, a non-responder has, or is identified as having, a greater percentage of immune cells having an exhausted phenotype, e.g., immune cells that co-express at least two exhaustion markers, e.g., co-expresses PD-1, PD-L1 and/or TIM-3. In other embodiments, a non-responder has, or is identified as having, a greater percentage of immune cells having an exhausted phenotype, e.g., immune cells that co-express at least two exhaustion markers, e.g., co-expresses PD-1 and LAG-3.

[1112] In some embodiments of any of the methods disclosed herein, a non-responder has, or is identified as having, a greater percentage of PD-1/PD-L1+/LAG-3+ cells in the CAR-expressing cell population compared to a responder (e.g., a complete responder) to the CAR-expressing cell therapy.

[1113] In some embodiments of any of the methods disclosed herein, a partial responder has, or is identified as having, a higher percentages of PD-1/PD-L1+/LAG-3+ cells, than a responder, in the CAR-expressing cell population.

[1114] In some embodiments of any of the methods disclosed herein, a non-responder has, or is identified as having, an exhausted phenotype of PD1/PD-L1+ CAR+ and co-expression of LAG3 in the CAR-expressing cell population.

[1115] In some embodiments of any of the methods disclosed herein, a non-responder has, or is identified as having, a greater percentage of PD-1/PD-L1+/TIM-3+ cells in the CAR-expressing cell population compared to the responder (e.g., a complete responder).

[1116] In some embodiments of any of the methods disclosed herein, a partial responders has, or is identified as having, a higher percentage of PD-1/PD-L1+/TIM-3+ cells, than responders, in the CAR-expressing cell population.

[1117] In some embodiments of any of the methods disclosed herein, the presence of CD8+CD27+CD45RO− T cells in an apheresis sample is a positive predictor of the subject response to a CAR-expressing cell therapy.

[1118] In some embodiments of any of the methods disclosed herein, a high percentage of PD1+ CAR+ and LAG3+ or TIM3+ T cells in an apheresis sample is a poor prognostic predictor of the subject response to a CAR-expressing cell therapy.

[1119] In some embodiments of any of the methods disclosed herein, the responder (e.g., the complete or partial responder) has one, two, three or more (or all) of the following profile:
[1120] (i) has a greater number of CD27+ immune effector cells compared to a reference value, e.g., a non-responder number of CD27+ immune effector cells;
[1121] (ii) has a greater number of CD8+ T cells compared to a reference value, e.g., a non-responder number of CD8+ T cells;
[1122] (iii) has a lower number of immune cells expressing one or more checkpoint inhibitors, e.g., a checkpoint inhibitor chosen from PD-1, PD-L1, LAG-3, TIM-3, or KLRG-1, or a combination, compared to a reference value, e.g., a non-responder number of cells expressing one or more checkpoint inhibitors; or
[1123] (iv) has a greater number of one, two, three, four or more (all) of resting T_{EFF} cells, resting T_{REG} cells, naïve CD4 cells, unstimulated memory cells or early memory T cells, or a combination thereof, compared to a reference value, e.g., a non-responder number of resting T_{EFF} cells, resting T_{REG} cells, naïve CD4 cells, unstimulated memory cells or early memory T cells.

[1124] In some embodiments of any of the methods disclosed herein, the cytokine level or activity of (vi) is chosen from one, two, three, four, five, six, seven, eight, or more (or all) of cytokine CCL20/MIP3a, IL17A, IL6, GM-CSF, IFNγ, IL10, IL13, IL2, IL21, IL4, IL5, IL9 or TNFα, or a combination thereof. The cytokine can be chosen from one, two, three, four or more (all) of IL-17a, CCL20, IL2, IL6, or TNFα. In one embodiment, an increased level or activity of a cytokine is chosen from one or both of IL-17a and CCL20, is indicative of increased responsiveness or decreased relapse.

[1125] In some embodiments of any of the methods disclosed herein, a transduction efficiency of 15% or higher in (vii) is indicative of increased responsiveness or decreased relapse.

[1126] In some embodiments of any of the methods disclosed herein, a transduction efficiency of less than 15% in (vii) is indicative of decreased responsiveness or increased relapse.

[1127] In embodiments, the responder, a non-responder, a relapser or a non-relapser identified by the methods herein can be further evaluated according to clinical criteria. For example, a complete responder has, or is identified as, a subject having a disease, e.g., a cancer, who exhibits a complete response, e.g., a complete remission, to a treatment. A complete response may be identified, e.g., using the NCCN Guidelines® (which are incorporated by reference herein in their entireties), as described herein. A partial responder has, or is identified as, a subject having a disease, e.g., a cancer, who exhibits a partial response, e.g., a partial remission, to a treatment. A partial response may be identified, e.g., using the NCCN Guidelines®, as described herein. A non-responder has, or is identified as, a subject having a disease, e.g., a cancer, who does not exhibit a response to a treatment, e.g., the patient has stable disease or progressive disease. A non-responder may be identified, e.g., using the NCCN Guidelines®, as described herein.

[1128] Alternatively, or in combination with the methods disclosed herein, responsive to said value, performing one, two, three, four or more of:
[1129] administering e.g., to a responder or a non-relapser, a CAR-expressing cell therapy;
[1130] administered an altered dosing of a CAR-expressing cell therapy;
[1131] altering the schedule or time course of a CAR-expressing cell therapy;
[1132] administering, e.g., to a non-responder or a partial responder, an additional agent in combination with a CAR-expressing cell therapy, e.g., a checkpoint inhibitor, e.g., a checkpoint inhibitor described herein;
[1133] administering to a non-responder or partial responder a therapy that increases the number of younger T cells in the subject prior to treatment with a CAR-expressing cell therapy;
[1134] modifying a manufacturing process of a CAR-expressing cell therapy, e.g., enriching for younger T cells prior to introducing a nucleic acid encoding a CAR, or increasing the transduction efficiency, e.g., for a subject identified as a non-responder or a partial responder;
[1135] administering an alternative therapy, e.g., for a non-responder or partial responder or relapser; or
[1136] if the subject is, or is identified as, a non-responder or a relapser, decreasing the T_{REG} cell population and/or T_{REG} gene signature, e.g., by one or more of CD25 depletion, administration of cyclophosphamide, anti-GITR antibody, or a combination thereof.

[1137] In certain embodiments, the subject is pre-treated with an anti-GITR antibody. In certain embodiment, the subject is treated with an anti-GITR antibody prior to infusion or re-infusion.

[1138] In some embodiments of the methods described herein, imaging with FDG-PET/CT (PET/CT) is performed on a subject who has been treated with a CAR therapy. This measurement can predict response to the therapy. For instance, in embodiments, metabolically active tumor volume (MTV) and/or [11F]-2-fluoro-2-deoxy-D-glucose (FDG) uptake are measured. In embodiments, a decrease in MTV is indicative of response, e.g., CR (complete response) or PR (partial response), e.g., a post-treatment MTV value of about 0 is indicative of CR, while an increase in MTV is indicative of PD (progressive disease). In embodiments, a decrease in FDG uptake is indicative of response, e.g., CR or PR, while an increase in FDG uptake is indicative of PD. In embodiments, the imaging is performed after administration of the CAR therapy, e.g., about 1 week, 2 weeks, 3 weeks, 4 weeks, 1 month, 2 months, 3 months, 4 months, 5 months, or 6 months after administration of the CAR therapy. In embodiments, the imaging is performed on a subject who does not have symptoms of CRS (cytokine release syndrome), e.g., a patient who suffered from CRS and whose symptoms resolved prior to imaging. In embodiments, the imaging is performed on a subject who has symptoms of CRS. In embodiments, imaging is performed prior to CAR therapy, and the pre-therapy image is compared to a post-therapy image. In embodiments, the subject has a cancer, e.g., lymphoma, e.g., diffuse large B-cell lymphoma (DLBCL) or follicular lymphoma (FL). In some embodiments, the CAR therapy comprises a CAR19-expressing cell, e.g., murine CTL019 or humanized CTL119 as described herein, e.g., Tables 2-3. In some embodiments, the CAR therapy comprises a CAR therapy described herein, e.g., a CAR20-expressing cell, a CAR22-expressing cell, or a CAR19-expressing cell, optionally in combination with a B-cell therapy.

### Personalized Medicine (Theranostics)

[1139] CD19 Characteristics, e.g. Mutations

[1140] Without wishing to be bound by theory, some cancer patients show an initial response to a CD19 inhibitor such as a CD19 CAR-expressing cell, and then relapse. In some embodiments, the relapse is caused (at least in part) by a frameshift and/or premature stop codon in CD19 in the cancer cells, or other change in the expression (including expression levels) of CD19 which reduces the ability of a CD19 CAR-expressing cell to target the cancer cells. Such a mutation can reduce the effectiveness of the CD19 therapy and contribute to the patient's relapse.

[1141] This application discloses, among other things, methods for treating a subject having cancer comprising one or more of: (1) determining if a subject has a difference, e.g., statistically significant difference, in a characteristic of CD19 relative to a reference characteristic, and (2) if there is a difference between the determined characteristic and reference characteristic, administering to the subject a therapeutically effective dose of a CAR therapy, e.g., CART, thereby treating the subject. The patient may be, e.g., a patient who has relapsed after treatment with a CD19 inhibitor, e.g., a CD19 CAR expressing cell. The patient may be a patient who has received or is receiving a CD19 CAR therapy and is at risk of relapse. The patient may be a non-responder to a CD19 CAR therapy.

[1142] In embodiments, the subject has or is identified as having a difference, e.g., a statistically significant difference, between a determined level compared to a reference level of one or more markers listed in Table 29 (on page 530 of International Application WO 2016/164731, filed Apr. 8, 2016, which is incorporated by reference in its entirety) in a biological sample.

[1143] In embodiments, the subject has or is identified as having a difference between a determined characteristic compared to a reference characteristic, in a characteristic of CD19, e.g., a mutation causing a frameshift or a premature stop codon or both, in a biological sample.

[1144] In embodiments, the subject has or is identified as having a difference, e.g., a statistically significant difference, between a determined level compared to a reference level of Treg cells in a biological sample.

[1145] Additional characteristics that can be measured to determine a therapeutically effectice dose of CAR therapy are described in pages 8-13, and 64-65 of International Application WO 2016/164731, filed Apr. 8, 2016, which is incorporated by reference in its entirety.

[1146] The characteristic can be, e.g., a CD19 sequence, e.g., protein or nucleic acid sequence. The sequence can be determined, e.g., as described in the Examples, by high throughput nucleic acid sequencing, or by mass spectrometry of proteins. As described in the Example herein, a patient may relapse after CD19 CART therapy because of mutations in CD19, e.g., in exon 2 of CD19, e.g., a mutation that causes a frameshift and a premature stop codon in CD19. In embodiments, the insertion or deletion does not cause one or both of a frameshift and a premature stop codon. The mutation may be, e.g., an insertion, a deletion, a substitution, a translocation, or a combination of any of the foregoing. The insertion, deletion, or substitution may involve, e.g., at least 1, 2, 3, 4, 5, 10, 15, 20, 20, or 50 nucleotides. The insertion, deletion, or substitution may involve, e.g., at most 2, 3, 4, 5, 10, 15, 20, 20, 50, or 100 nucleotides. In some cases, a population of cells will comprise more than one mutation. In such cases, the mutations can be in overlapping or non-overlapping sub-populations of cells.

[1147] In some cases a patient is identified as having a CD19 characteristic that reduces CD19's ability to engage with a CD19 inhibitor such as a CD19 CAR expressing cell. Such a characteristic may be, e.g., a frameshift mutation, a premature stop codon, an alteration in nucleic acid sequence or an alteration in the structure of the primary mRNA transcript. The characteristic may be, e.g., a departure from normal production of CD19 that occurs earlier than splicing. The characteristic may be, e.g., a characteristic other than exon skipping. Such patients may be treated with an inhibitor of another target, e.g., a B-cell inhibitor, for example a CAR expressing cell directed against another epitope, e.g., an epitope within one or more of CD10, CD20, CD22, CD34, CD123, FLT-3, or ROR1.

[1148] In some cases, a patient is identified as having a CD19 characteristic that reduces CD19's ability to engage with a CD19 inhibitor, such as a CD19 CAR expressing cell, but does not reduce or abrogate CD19's ability to engage with a second CD19 inhibitor, such as a CD19 inhibitor that binds to a different region on CD19. Such a characteristic may be, e.g., a mutation that does not cause one or both of a frameshift mutation or a premature stop codon. Such a characteristic may be, e.g., an alteration in nucleic acid sequence or an alteration in the structure of the primary mRNA transcript, a departure from normal production of CD19 that occurs earlier than splicing, or a characteristic other than exon skipping. Such patients may be treated with an inhibitor of CD19, e.g., a B-cell inhibitor directed against an intact region of CD19, e.g., a wild-type portion of CD19. For instance, if a mutation is present in exon 2, the second CD19 inhibitor may bind to an exon other than exon 2, or a part of exon 2 that lacks the mutation. The second CD19 inhibitor may be, e.g., a CD19 inhibitor described herein.

T_{EFF} and T_{REG} Signatures

[1149] Methods herein can include steps of determining a T_{REG} signature or determining the levels of T_{EFF} cells or T_{REG} cells, e.g., in a patient or in a population of cells e.g., immune cells. Methods herein can also include steps of reducing the level of T_{REG} cells, or decreasing a T_{REG} signature, in a patient or in a population of cells. In some embodiments, a T_{EFF} is a cell with upregulated expression of one or more (e.g., at least 10, 20, 30, 40, 50, 60, 70, 80, or all) of the following genes: AIM2, ALAS1, B4GALT5, BATF, C3orf26, C4orf43, CCL3, CCL4, CCT3, CCT7, CD40LG, CHAC2, CSF2, CTNNA1, EBNA1BP2, EDARADD, EEF1E1, EIF2B3, EIF2S1, FABP5, FAM40B, FKBP4, FOSL1, GFOD1, GLRX2, HSPD1, HSPE1, IFNG, IL15RA, IL21, IL2RA, IL3, KCNK5, KIAA0020, LARP4, LRP8, LTA, MANF, MIR1182, MIR155, MIR155HG, MTCH2, MYOF, NDUFAF1, NLN, NME1, NME1-NME2, OTUD7B, PAM, PDIA6, PEA15, PFKM, PGAM1, PGAM4, PPIL1, PRDX4, PRSS23, PSMD1, PSMD11, PSMD14, PTRH2, PUS7, RBBP8, RPF2, RPP25, SFXN1, SLC27A2, SLC39A14, SLC43A3, SORD, SPR, SRXN1, STIP1, STT3A, TBX21, TMCC2, TMEM165, TNFRSF9, TXN, TXNDCS, UCK2, VDR, WDR12, YWHAG, and ZDHHC16. In some embodiments, a T_{REG} cell is a cell with upregulated expression of one or more (e.g., at least 10, 20, 30, 40, 50, 60, 70, or all) of the following genes: AIM2, ALAS1, BATF, C5orf32, CCL17, CD40LG, CHAC2, CSF1, CTSL1, EBNA1BP2, EDARADD, EMP1, EPAS1, FABP5, FAM40B, FKBP4, FOSL1, GCLM, GK, GPR56, HMOX1, HSPD1, HSPE1, IKBIP, IL10, IL13, IL15RA, IL1RN, IL2RA, IL3, IL4, IL5, IL9, KCNK5, LTA, MANF, MIR1182, MIR155, MIR155HG, MYOF, NDUFAF1, NLN, NME1, NME1-NME2, PANX2, PDIA6, PGAM4, PPIL1, PPPDE2, PRDX4, PRKAR1B, PSMD1, PSMD11, PUS7, RBBP8, SLC27A2, SLC39A14, SLC43A3, SRXN1, STIP1, STT3A, TBX21, TNFRSF11A, TNFRSF1B, TNFRSF8, TNFRSF9, TXN, UCK2, VDR, VTRNA1-3, WDR12, YWHAG, ZDHHC16, and ZNF282. The upregulated expression may be, e.g., measured 16 hours after stimulation. The upregulated expression may be determined, e.g., by measuring RNA levels for the indicated genes.

[1150] In embodiments, the method comprises decreasing the T_{REG} signature in the subject prior to apheresis. In embodiments, the method further comprises decreasing the T_{REG} signature in the subject, e.g., by administering cyclophosphamide, an anti-GITR antibody, or both to the subject. In embodiments, the method comprises pre-treating a subject with cyclophosphamide, an anti-GITR antibody, or both, prior to collection of cells for CAR-expressing cell product manufacturing. In embodiments, the method further comprises obtaining a sample from the subject, wherein the sample comprises a cellular fraction (e.g., which comprises blood), a tissue fraction, an apheresis sample, or a bone marrow sample.

### Pharmaceutical Compositions and Treatments

[1151] Pharmaceutical compositions of the present invention may comprise, in some aspects, a CAR-expressing cell, e.g., a plurality of CAR-expressing cells, as described herein, in combination with one or more pharmaceutically or physiologically acceptable carriers, diluents or excipients. Such compositions may comprise buffers such as neutral buffered saline, phosphate buffered saline and the like; carbohydrates such as glucose, mannose, sucrose or dextrans, mannitol; proteins; polypeptides or amino acids such as glycine; antioxidants; chelating agents such as EDTA or glutathione; adjuvants (e.g., aluminum hydroxide); and preservatives. Compositions of the present invention are in one aspect formulated for intravenous administration.

[1152] Pharmaceutical compositions of the present invention may be administered in a manner appropriate to the disease to be treated (or prevented). The quantity and frequency of administration will be determined by such factors as the condition of the patient, and the type and severity of the patient's disease, although appropriate dosages may be determined by clinical trials.

[1153] In one embodiment, the pharmaceutical composition is substantially free of, e.g., there are no detectable levels of a contaminant, e.g., selected from the group consisting of endotoxin, mycoplasma, replication competent lentivirus (RCL), p24, VSV-G nucleic acid, HIV gag, residual anti-CD3/anti-CD28 coated beads, mouse antibodies, pooled human serum, bovine serum albumin, bovine serum, culture media components, vector packaging cell or plasmid components, a bacterium and a fungus. In one embodiment, the bacterium is at least one selected from the group consisting of Alcaligenes faecalis, Candida albicans, Escherichia coli, Haemophilus influenza, Neisseria meningitides, Pseudomonas aeruginosa, Staphylococcus aureus, Streptococcus pneumonia, and Streptococcus pyogenes group A.

[1154] When “an immunologically effective amount,” “an anti-tumor effective amount,” “a tumor-inhibiting effective amount,” or “therapeutic amount” is indicated, the precise amount of the compositions of the present invention to be administered can be determined by a physician with consideration of individual differences in age, weight, tumor size, extent of infection or metastasis, and condition of the patient (subject). In some embodiments, a pharmaceutical composition comprising the cells, e.g., T cells described herein may be administered at a dosage of 10⁴ to 10⁹ cells/kg body weight, in some instances 10⁵ to 10⁶ cells/kg body weight, including all integer values within those ranges. In some embodiments, the cells, e.g., T cells described herein may be administered at 3×10⁴, 1×10⁶, 3×10⁶, or 1×10⁷ cells/kg body weight. The cell compositions may also be administered multiple times at these dosages. The cells can be administered by using infusion techniques that are commonly known in immunotherapy (see, e.g., Rosenberg et al., New Eng. J. of Med. 319:1676, 1988).

[1155] In some embodiments, a dose of CAR cells (e.g., CD19 or BCMA CAR cells) comprises about 1×10⁵, 2×10⁵, 5×10⁵, 1×10⁶, 1.1×10⁶, 2×10⁶, 3.6×10⁶, 5×10⁶, 1×10⁷, 1.8×10⁷, 2×10⁷, 5×10⁷, 1×10⁸, 2×10⁸, or 5×10⁸ cells/kg. In some embodiments, a dose of CAR cells (e.g., CD19 or BCMA CAR cells) comprises at least about 1×10⁵, 2×10⁵, 5×10⁵, 1×10⁶, 1.1×10⁶, 2×10⁶, 3.6×10⁶, 5×10⁶, 1×10⁷, 1.8×10⁷, 2×10⁷, 5×10⁷, 1×10⁸, 2×10⁸, or 5×10⁸ cells/kg. In some embodiments, a dose of CAR cells (e.g., CD19 or BCMA CAR cells) comprises up to about 1×10⁵, 2×10⁵, 5×10⁵, 1×10⁶, 1.1×10⁶, 2×10⁶, 3.6×10⁶, 5×10⁶, 1×10⁷, 1.8×10⁷, 2×10⁷, 5×10⁷, 1×10⁸, 2×10⁸, or 5×10⁸ cells/kg. In some embodiments, a dose of CAR cells (e.g., CD19 or BCMA CAR cells) comprises about 1.1×10⁶-1.8×10⁷ cells/kg or about 8×10⁵-1.5×10⁶ cells/kg. In some embodiments, a dose of CAR cells (e.g., CD19 or BCMA CAR cells) comprises about 1×10⁷, 2×10⁷, 5×10⁷, 1×10⁸, 2×10⁸, 5×10⁸, 1×10⁹, 2×10⁹, or 5×10⁹ cells. In some embodiments, a dose of CAR cells (e.g., CD19 or BCMA CAR cells) comprises at least about 1×10⁷, 2×10⁷, 5×10⁷, 1×10⁸, 2×10⁸, 5×10⁸, 1×10⁹, 2×10⁹, or 5×10⁹ cells. In some embodiments, a dose of CAR cells (e.g., CD19 or BCMA CAR cells) comprises up to about 1×10⁷, 2×10⁷, 5×10⁷, 1×10⁸, 2×10⁸, 5×10⁸, 1×10⁹, 2×10⁹, or 5×10⁹ cells.

[1156] In certain aspects, it may be desired to administer activated cells, e.g., T cells or NK cells, to a subject and then subsequently redraw blood (or have an apheresis performed), activate the cells therefrom according to the present invention, and reinfuse the patient with these activated and expanded cells. This process can be carried out multiple times every few weeks. In certain aspects, cells, e.g., T cells or NK cells, can be activated from blood draws of from 10 cc to 400 cc. In certain aspects, cells, e.g., T cells or NK cells, are activated from blood draws of 20 cc, 30 cc, 40 cc, 50 cc, 60 cc, 70 cc, 80 cc, 90 cc, or 100 cc.

[1157] The administration of the subject compositions may be carried out in any convenient manner, including by aerosol inhalation, injection, ingestion, transfusion, implantation or transplantation. The compositions described herein may be administered to a patient trans arterially, subcutaneously, intradermally, intratumorally, intranodally, intramedullary, intramuscularly, by intravenous (i.v.) injection, or intraperitoneally. In one aspect, the cell compositions, e.g., T cell or NK cell compositions, of the present invention are administered to a patient by intradermal or subcutaneous injection. In one aspect, the cell compositions e.g., T cell or NK cell compositions, of the present invention are administered by i.v. injection. The compositions of cells e.g., T cell or NK cell compositions, may be injected directly into a tumor, lymph node, or site of infection.

[1158] In an aspect, subjects may undergo leukapheresis, wherein leukocytes are collected, enriched, or depleted ex vivo to select and/or isolate the cells of interest, e.g., T cells. These cell isolates, e.g., T cell or NK cell isolates, may be expanded by methods known in the art and treated such that one or more CAR constructs of the invention may be introduced, thereby creating a CAR-expressing cell, e.g., CAR T cell of the invention. Subjects in need thereof may subsequently undergo standard treatment with high dose chemotherapy followed by peripheral blood stem cell transplantation. In certain aspects, following or concurrent with the transplant, subjects receive an infusion of the expanded CAR-expressing cells of the present invention. In an additional aspect, expanded cells are administered before or following surgery.

[1159] The dosage of the above treatments to be administered to a patient will vary with the precise nature of the condition being treated and the recipient of the treatment. The scaling of dosages for human administration can be performed according to art-accepted practices. The dose for a therapeutic, e.g., an antibody, e.g., CAMPATH, for example, may be, e.g., in the range 1 to about 100 mg for an adult patient, e.g., administered daily for a period between 1 and 30 days. A suitable daily dose is 1 to 10 mg per day although in some instances larger doses of up to 40 mg per day may be used (described in U.S. Pat. No. 6,120,766).

[1160] In one embodiment, the CAR is introduced into cells, e.g., T cells or NK cells, e.g., using in vitro transcription, and the subject (e.g., human) receives an initial administration of CAR-expressing cells, e.g., CAR T cells of the invention, and one or more subsequent administrations of the CAR-expressing cells, e.g., CAR T cells of the invention, wherein the one or more subsequent administrations are administered less than 15 days, e.g., 14, 13, 12, 11, 10, 9, 8, 7, 6, 5, 4, 3, or 2 days after the previous administration. In one embodiment, more than one administration of the CAR-expressing cells, e.g., CAR T cells of the invention are administered to the subject (e.g., human) per week, e.g., 2, 3, or 4 administrations of the CAR-expressing cells, e.g., CAR T cells of the invention are administered per week. In one embodiment, the subject (e.g., human subject) receives more than one administration of the CAR-expressing cells, e.g., CAR T cells per week (e.g., 2, 3 or 4 administrations per week) (also referred to herein as a cycle), followed by a week of no CAR-expressing cells, e.g., CAR T cells administrations, and then one or more additional administration of the CAR-expressing cells, e.g., CAR T cells (e.g., more than one administration of the CAR-expressing cells, e.g., CAR T cells per week) is administered to the subject. In another embodiment, the subject (e.g., human subject) receives more than one cycle of CAR-expressing cells, e.g., CAR T cells, and the time between each cycle is less than 10, 9, 8, 7, 6, 5, 4, or 3 days. In one embodiment, the CAR-expressing cells, e.g., CAR T cells are administered every other day for 3 administrations per week. In one embodiment, the CAR-expressing cells, e.g., CAR T cells of the invention are administered for at least two, three, four, five, six, seven, eight or more weeks.

[1161] In some embodiments, subjects may be adult subjects (i.e., 18 years of age and older). In certain embodiments, subjects may be between 1 and 30 years of age. In some embodiments, the subjects are 16 years of age or older. In certain embodiments, the subjects are between 16 and 30 years of age. In some embodiments, the subjects are child subjects (i.e., between 1 and 18 years of age).

[1162] In one aspect, CAR-expressing cells, e.g., CARTs are generated using lentiviral viral vectors, such as lentivirus. CAR-expressing cells, e.g., CARTs generated that way will have stable CAR expression.

[1163] In one aspect, CAR-expressing cells, e.g., CARTs, are generated using a viral vector such as a gammaretroviral vector, e.g., a gammaretroviral vector described herein. CARTs generated using these vectors can have stable CAR expression.

[1164] In one aspect, CAR-expressing cells, e.g., CARTs transiently express CAR vectors for 4, 5, 6, 7, 8, 9, 10, 11, 12, 13, 14, 15 days after transduction. Transient expression of CARs can be effected by RNA CAR vector delivery. In one aspect, the CAR RNA is transduced into the cell, e.g., NK cell or T cell, by electroporation.

[1165] A potential issue that can arise in patients being treated using transiently expressing CAR T cells (particularly with murine scFv bearing CARTs) is anaphylaxis after multiple treatments.

[1166] Without being bound by this theory, it is believed that such an anaphylactic response might be caused by a patient developing humoral anti-CAR response, i.e., anti-CAR antibodies having an anti-IgE isotype. It is thought that a patient's antibody producing cells undergo a class switch from IgG isotype (that does not cause anaphylaxis) to IgE isotype when there is a ten to fourteen day break in exposure to antigen.

[1167] If a patient is at high risk of generating an anti-CAR antibody response during the course of transient CAR therapy (such as those generated by RNA transductions), CART infusion breaks should not last more than ten to fourteen days.

### CAR22

[1168] Design, function and sequences of CAR22 constructs, and exemplary CAR22 constructs, are described, e.g., in pages 363-422 of International Application WO 2016/164731, filed Apr. 8, 2016, which is incorporated by reference in its entirety.

### CAR20 Constructs

[1169] Design, function and sequences of CAR20 constructs, and exemplary CAR20 constructs, are described, e.g., in pages 422-454 of International Application WO 2016/164731, filed Apr. 8, 2016, which is incorporated by reference in its entirety.

### CAR123 Constructs

[1170] Design, function and sequences of CAR123 constructs, and exemplary CAR123 constructs, are described, e.g., in pages 454-501 of International Application WO 2016/164731, filed Apr. 8, 2016, which is incorporated by reference in its entirety.

### Bispecific CAR19/CAR22 Constructs and Function Thereof

[1171] The production and function of bispecific CAR19/CAR22 constructs is described, e.g., on pages 501-506 of International Application WO 2016/164731, filed Apr. 8, 2016, which is incorporated by reference in its entirety. The anti-CD19 base molecule is a humanized anti-CD19 sequence, provided as construct ID 104876 of Table 2, which uses the LH orientation.

[1172] The nucleotide and amino acid sequences of CAR19/CAR22 constructs, are provided in Table 28 on pages 501-508 of International Application WO 2016/164731.

### EXAMPLES

[1173] The invention is further described in detail by reference to the following experimental examples. These examples are provided for purposes of illustration only, and are not intended to be limiting unless otherwise specified. Thus, the invention should in no way be construed as being limited to the following examples, but rather, should be construed to encompass any and all variations which become evident as a result of the teaching provided herein.

[1174] Without further description, it is believed that one of ordinary skill in the art can, using the preceding description and the following illustrative examples, make and utilize the compounds of the present invention and practice the claimed methods. The following working examples specifically point out various aspects of the present invention, and are not to be construed as limiting in any way the remainder of the disclosure.

### Example 1: Tandem Induction Radiation and Chimeric Antigen Receptor T Cell Therapy in Patients with Relapsed or Refractory Non-Hodgkin Lymphoma

### Introduction

[1175] Chimeric antigen receptor-modified T cell (CAR-T) therapies targeting lymphoma-specific epitopes have demonstrated efficacy in relapsed/refractory non-Hodgkin lymphoma. Radiotherapy (RT) can be used as bridging therapy for symptomatic progression, and/or as lymphodepletion prior to CAR-T infusion. The tandem sequencing of RT and CAR-T as disclosed in this Example has not been previously disclosed.

### Methods

[1176] Patients enrolled in a phase IIA study evaluating autologous T cells engineered to express CD19-directed CAR (NCT02030834) were divided into no RT or RT prior to infusion groups, including: induction RT (RT administered <30 days prior to CAR-T), prior RT (RT administered >30 days but <12 months prior to CAR-T), and remote RT (RT administered >12 months prior to CAR-T). As described in this Example, CAR-T in vivo expansion, side effects, and outcomes were determined. Median follow-up was defined as time from CAR-T infusion to event or last follow-up (f/u). Descriptive statistics were used to summarize data with Kaplan-Meier analysis for progression-free (PFS) and overall survival (OS).

### Results

[1177] Forty-one patients were evaluable and had the following characteristics: 18 no RT, 5 induction RT, 7 prior RT, and 11 remote RT. Patients included those with diffuse large B cell lymphoma (61%), follicular lymphoma (34%), and mantle cell lymphoma (5%). Induction RT was used to manage symptoms and was incorporated into the lymphodepleting regimen in those patients. Patients in the induction RT group began RT after T cell collection, e.g., on average 12 days prior to re-infusion (range 7-19); those in the prior RT group received RT e.g., on average 146 days prior to T cell collection (range 99-263). Median follow-up time was 674 days for all patients. One-year PFS and OS for each group were: 44% and 65% for theno RT group, 78% and 100% for the induction RT group, 0% and 86% for the prior RT group, and 61% and 90% for the remote RT group, respectively. Cytokine release syndrome (CRS), e.g., of more than grade 3, occurred in 10 of 41 patients overall (24%), but in no patient in the induction RT group (0 of 5). CAR-T expansion and day of peak CAR-T were not affected by RT given at any interval prior to T cell collection or re-infusion.

### Conclusions

[1178] This Example shows that induction RT prior to CAR-T infusion, e.g., does not impact the efficacy of CAR-T therapy, and may be associated with, e.g., a lower incidence of CRS. Given that RT can both palliate symptoms and be used in lymphodepletion regimens, this tandem approach warrants further exploration.

### Example 2: Chimeric Antigen Receptor T-Cell Therapy in Pediatric/Adolescent/Young Adult Patients with Acute Lymphoblastic Leukemia in First Relapse after Allogeneic Stem Cell Transplant in CR1

[1179] Background:

[1180] Patients with B-cell acute lymphoblastic leukemia (ALL) who relapse after first allogeneic stem cell transplant (alloSCT) have a poor prognosis. A recent study using the CIBMTR database reported a median survival of 7.4 months (95% CI, 6.0-9.6 months) (Crotta A., et al., (2017) Current Medical Research and Opinion 34(3):435-440). ELIANA and ENSIGN trials of the chimeric antigen receptor (CAR) T-cell therapy tisagenlecleucel (CAR19) in pediatric and adolescent/young adult (AYA) patients with relapsed/refractory (R/R) ALL included patients who relapsed after alloSCT (54%). Most relapsed patients were in a 2nd relapse or more, e.g., 3^{rd} relapse, 4^{th} relapse or 5^{th} relapse. Here we evaluate the outcomes of patients who received tisagenlecleucel following their first relapse after alloSCT performed in first complete remission (CR1).

[1181] Objective:

[1182] This Example describes the results of a study designed to examine efficacy and safety outcomes in this subset of patients who received tisagenlecleucel for first relapse following alloSCT in CR1.

[1183] Methods:

[1184] Pooled data from 2 single-arm, multicenter, phase 2 trials (ELIANA, N=75 [NCT02435849] and ENSIGN, N=58 [NCT02228096]) evaluated the efficacy and safety of tisagenlecleucel in pediatric and AYA patients with R/R ALL. Five patients received alloSCT as part of their initial therapy in CR1. After relapsing after alloSCT, they received tisagenlecleucel and were thus considered to be in their first relapse.

[1185] Results:

[1186] All 5 patients who received tisagenlecleucel in first relapse underwent chemotherapy after initial diagnosis followed by alloSCT in CR1. One patient received a transplant from a matched unrelated donor while the other 4 received transplants from matched siblings. Patients relapsed 4.5, 5.8, 12.4, 17.5 and 18.6 months following alloSCT with myeloablative conditioning. Blast counts at enrollment were 7%, 29%, 34%, 73%, and 79%; in the pooled ELIANA/ENSIGN cohort (N=133), and bone marrow blasts ranged from 5% to 99%. Four patients were male—aged 4, 7, 9 and 10 years at enrollment. One patient was female—aged 18 years at enrollment. Infusion with tisagenlecleucel took place 1.3, 1.5, 2.0, 3.1, and 4.4 months after relapse, a range comparable to that in the ELIANA/ENSIGN cohort (1-14 months). Four of 5 patients achieved minimal residual disease (MRD)-negative CRs (overall remission rate, 80%). One patient had unknown overall response because cerebral spinal fluid assessment was not done, although MRD-negative bone marrow remission was observed. Durations of remission in patients who achieved complete response (CR) starting from onset of remission were 3.2+ months (proceeded to SCT while in remission), 7.5+ months (non-SCT new therapy while in remission), 14.2+ months (ongoing remission), and 29.6+ months (non-SCT new therapy for secondary malignancy). All patients were alive at the end of the analysis. Overall survival was 1.8+, 10.8+, 15.1+, 18.8+, and 33.3+ months after infusion. Only 1 patient experienced cytokine release syndrome (CRS) (grade 3), and no patients experienced neurological toxicity. In the pooled cohort, 79% of patients experienced CRS (41% grade 3 or 4), and 37% experienced neurological events of any grade. The data from all 5 patients is summarized in Table 6.

TABLE 6
Characteristics of Patients Treated with Tisagenlecleucel
in First Relapse Following AlloSCT in CR1.

| | | | | | Patient |
|---|---|---|---|---|---|
| | Patient 1 | Patient 2 | Patient 3^{a} | Patient 4 | 5 |
| Age, years | 7 | 10 | 9 | 4 | 18 |
| Transplant | MUD | MSD | MSD | MSD | MSD |
| Time from | 4.5 | 12.4 | 18.6 | 17.5 | 5.8 |
| transplant to | | | | | |
| relapse, months | | | | | |
| Time from | 4.4 | 1.5 | 2.0 | 1.3 | 3.1 |
| relapse to | | | | | |
| infusion, | | | | | |
| months | | | | | |
| Best overall | CR | CR | CR | CR | UKN^{b} |
| response | | | | | |
| MRD status | Negative | Negative | Negative | Negative | — |
| Overall | 10.8+ | 18.8+ | 15.1+ | 33.3+ | 1.8+ |
| survival, | | | | | |
| months | | | | | |
| Maximum | None | Grade 3 | None | None | None |
| grade CRS | | | | | |
| Neurotoxicity | None | None | None | None | None |

^{a}Patient had Philadelphia chromosome-positive ALL.
^{b}Bone marrow remission was observed but cerebral spinal fluid assessment was not made.
AE, adverse event;
CR, complete remission;
CRS, cytokine release syndrome;
MRD, minimal residual disease;
MSD, matched sibling donor;
MUD, matched unrelated donor;
UKN, unknown.

### Example 3: Analysis of Patients with Relapsed or Refractory Non-Hodgkin Lymphoma Who Received Tandem Induction Radiation and Chimeric Antigen Receptor T Cell Therapy

[1187] This Example describes the exploratory analysis of patients in the NCT02030834 trial who were treated with CAR19-expressing cell therapy. Patients were treated with lymphodepleting therapy, e.g., chemotherapy or radiation therapy, or a combination thereof, prior to administration of CAR19-expressing cell therapy.

[1188] Patients who had been administered radiation therapy (RT) as part of the lymphodepleting therapy were evaluated as described in Table 7. In some embodiments, patients had no RT, remote RT (e.g., more than 12 months prior to administration of CAR19-expressing cell therapy), prior RT (e.g., more than 30 day but less than 12 months prior to administration of CAR19-expressing cell therapy, e.g., recent radiotherapy, e.g., prior to apheresis), or tandem/induction RT (e.g., less than 30 days prior to administration of CAR19-expressing cell therapy, e.g., after apheresis). In some embodiments, tandem/induction RT is also used as a lymphodepleting chemotherapy.

TABLE 7
Patient demographics

| | |
|---|---|
| Age, median (range) | 56 (24-77) |
| Sex, n (%) | |
| Male | 25 (61) |
| Female | 16 (39) |
| Previoustherapies, median (range) | 5 (1-10) |
| Pathologic subtype, n (%) | |
| DLBCL | 25 (61) |
| Follicular | 14 (34) |
| Mantle | 2 (5) |
| Prior radiotherapy, n (%) | |
| Yes | 23 (56) |
| No | 18 (44)) |
| Timing of radiotherapy, n (%) | |
| NoRT | 18 (44) |
| Remote RT (>1 year) | 11 (27) |
| Prior RT (>30 days) | 7 (17) |
| Tandem/Bridging (<30 days) | 5 (12) |
| Indications for bridging therapy | |
| Symptomatic progression | 4 |
| Pain | 1 |
| Fractionation | |
| 40 Gy, 2Gy/fraction | 2 |
| 4 Gy, 2Gy/fraction | 2 |
| 22 Gy, 2,2 Gy/fraction | 1 |

### Results:

[1189] Patients who received tandem/induction RT prior to CAR19 therapy, had improved progression free survival (PFS) and overall survival (OS) compared to patients who received no RT, remote RT or prior RT (FIGS. 1A-1B and Table 8). In patients who had tandem/induction RT (e.g., bridging radiotherapy), the absolute lymphocyte count (ALC) was lower post-RT as compared to levels pre-RT (FIG. 2). The pre-RT ALC median was about 0.4, e.g., in the range of about 0.22 to 1.61. The post-RT ALC median was about 0.13, e.g., in the range of about 0.09-1.08.

[1190] With respect to cytokine release syndrome and neurotoxicity, patients who received tandem/induction RT, e.g., bridging radiotherapy, demonstrated, e.g., no or low CRS, e.g., grade 3 or higher CRS (Table 9). Patients who received tandem/induction RT, e.g., bridging radiotherapy, also demonstrated low levels of neurotoxicity.

TABLE 8
Survival analysis in patients receiving RT

| | PFS (days) | OS (days) |
|---|---|---|
| No RT | 196 (28-1239) | 578 (105-1296) |
| RemoteRT (>1 year) | 279 (15-1422) | 674 (87-1422) |
| Prior RT (>30 days) | 85 (11-344) | 315 (195-1386) |
| Tandem/Bridging | 659 (26-1183) | 669 (26-1183) |

TABLE 9
CRS in patients receiving RT

| Grade 3+ CRS | n | % |
|---|---|---|
| No RT | 5 | 28% |
| RemoteRT (>1 | 3 | 27% |
| year) | | |
| Prior RT (>30 days) | 2 | 29% |
| Tandem/bridging | 0 | 0% |

[1191] This example demonstrates, e.g., that radiation therapy (RT) as a bridging therapy in tandem with CAR-expressing cell therapy, e.g., CAR19-expressing cell therapy, is safe. In some embodiments, radiation therapy does not affect the expansion and/or proliferation of CAR-expressing cells. The exploratory analysis documented in this example illustrates that, e.g., patients treated with RT as a tandem/induction RT, e.g., bridging therapy, did not demonstrate CRS, e.g., severe CRS, e.g., grade 3 or higher CRS, after demonstration of a CAR-expressing cell therapy, e.g., CD19 CAR-expressing cell therapy.

### EQUIVALENTS

[1192] The disclosures of each and every patent, patent application, and publication cited herein are hereby incorporated herein by reference in their entirety. While this invention has been disclosed with reference to specific aspects, it is apparent that other aspects and variations of this invention may be devised by others skilled in the art without departing from the true spirit and scope of the invention. The appended claims are intended to be construed to include all such aspects and equivalent variations.

The application's sequence listing, which the Patent Office published only in electronic form, follows.

SEQUENCE LISTING (4004 sequences)

SEQ ID NO: 1 - protein, 242 aa, Artificial Sequence
  Description of Artificial Sequence: Synthetic polypeptide
EIVMTQSPATLSLSPGERATLSCRASQDISKYLNWYQQKPGQAPRLLIYHTSRLHSGIPARFSGSGSGTDYTLTISSLQPEDFAVYFCQQGNTLPYTFGQGTKLEIKGGGGSGGGGSGGGGSQVQLQESGPGLVKPSETLSLTCTVSGVSLPDYGVSWIRQPPGKGLEWIGVIWGSETTYYSSSLKSRVTISKDNSKNQVSLKLSSVTAADTAVYYCAKHYYYGGSYAMDYWGQGTLVTVSS

SEQ ID NO: 2 - protein, 242 aa, Artificial Sequence
  Description of Artificial Sequence: Synthetic polypeptide
EIVMTQSPATLSLSPGERATLSCRASQDISKYLNWYQQKPGQAPRLLIYHTSRLHSGIPARFSGSGSGTDYTLTISSLQPEDFAVYFCQQGNTLPYTFGQGTKLEIKGGGGSGGGGSGGGGSQVQLQESGPGLVKPSETLSLTCTVSGVSLPDYGVSWIRQPPGKGLEWIGVIWGSETTYYQSSLKSRVTISKDNSKNQVSLKLSSVTAADTAVYYCAKHYYYGGSYAMDYWGQGTLVTVSS

SEQ ID NO: 3 - protein, 242 aa, Artificial Sequence
  Description of Artificial Sequence: Synthetic polypeptide
QVQLQESGPGLVKPSETLSLTCTVSGVSLPDYGVSWIRQPPGKGLEWIGVIWGSETTYYSSSLKSRVTISKDNSKNQVSLKLSSVTAADTAVYYCAKHYYYGGSYAMDYWGQGTLVTVSSGGGGSGGGGSGGGGSEIVMTQSPATLSLSPGERATLSCRASQDISKYLNWYQQKPGQAPRLLIYHTSRLHSGIPARFSGSGSGTDYTLTISSLQPEDFAVYFCQQGNTLPYTFGQGTKLEIK

SEQ ID NO: 4 - protein, 242 aa, Artificial Sequence
  Description of Artificial Sequence: Synthetic polypeptide
QVQLQESGPGLVKPSETLSLTCTVSGVSLPDYGVSWIRQPPGKGLEWIGVIWGSETTYYQSSLKSRVTISKDNSKNQVSLKLSSVTAADTAVYYCAKHYYYGGSYAMDYWGQGTLVTVSSGGGGSGGGGSGGGGSEIVMTQSPATLSLSPGERATLSCRASQDISKYLNWYQQKPGQAPRLLIYHTSRLHSGIPARFSGSGSGTDYTLTISSLQPEDFAVYFCQQGNTLPYTFGQGTKLEIK

SEQ ID NO: 5 - protein, 247 aa, Artificial Sequence
  Description of Artificial Sequence: Synthetic polypeptide
EIVMTQSPATLSLSPGERATLSCRASQDISKYLNWYQQKPGQAPRLLIYHTSRLHSGIPARFSGSGSGTDYTLTISSLQPEDFAVYFCQQGNTLPYTFGQGTKLEIKGGGGSGGGGSGGGGSGGGGSQVQLQESGPGLVKPSETLSLTCTVSGVSLPDYGVSWIRQPPGKGLEWIGVIWGSETTYYSSSLKSRVTISKDNSKNQVSLKLSSVTAADTAVYYCAKHYYYGGSYAMDYWGQGTLVTVSS

SEQ ID NO: 6 - protein, 247 aa, Artificial Sequence
  Description of Artificial Sequence: Synthetic polypeptide
EIVMTQSPATLSLSPGERATLSCRASQDISKYLNWYQQKPGQAPRLLIYHTSRLHSGIPARFSGSGSGTDYTLTISSLQPEDFAVYFCQQGNTLPYTFGQGTKLEIKGGGGSGGGGSGGGGSGGGGSQVQLQESGPGLVKPSETLSLTCTVSGVSLPDYGVSWIRQPPGKGLEWIGVIWGSETTYYQSSLKSRVTISKDNSKNQVSLKLSSVTAADTAVYYCAKHYYYGGSYAMDYWGQGTLVTVSS

SEQ ID NO: 7 - protein, 247 aa, Artificial Sequence
  Description of Artificial Sequence: Synthetic polypeptide
QVQLQESGPGLVKPSETLSLTCTVSGVSLPDYGVSWIRQPPGKGLEWIGVIWGSETTYYSSSLKSRVTISKDNSKNQVSLKLSSVTAADTAVYYCAKHYYYGGSYAMDYWGQGTLVTVSSGGGGSGGGGSGGGGSGGGGSEIVMTQSPATLSLSPGERATLSCRASQDISKYLNWYQQKPGQAPRLLIYHTSRLHSGIPARFSGSGSGTDYTLTISSLQPEDFAVYFCQQGNTLPYTFGQGTKLEIK

SEQ ID NO: 8 - protein, 247 aa, Artificial Sequence
  Description of Artificial Sequence: Synthetic polypeptide
QVQLQESGPGLVKPSETLSLTCTVSGVSLPDYGVSWIRQPPGKGLEWIGVIWGSETTYYQSSLKSRVTISKDNSKNQVSLKLSSVTAADTAVYYCAKHYYYGGSYAMDYWGQGTLVTVSSGGGGSGGGGSGGGGSGGGGSEIVMTQSPATLSLSPGERATLSCRASQDISKYLNWYQQKPGQAPRLLIYHTSRLHSGIPARFSGSGSGTDYTLTISSLQPEDFAVYFCQQGNTLPYTFGQGTKLEIK

SEQ ID NO: 9 - protein, 247 aa, Artificial Sequence
  Description of Artificial Sequence: Synthetic polypeptide
EIVMTQSPATLSLSPGERATLSCRASQDISKYLNWYQQKPGQAPRLLIYHTSRLHSGIPARFSGSGSGTDYTLTISSLQPEDFAVYFCQQGNTLPYTFGQGTKLEIKGGGGSGGGGSGGGGSGGGGSQVQLQESGPGLVKPSETLSLTCTVSGVSLPDYGVSWIRQPPGKGLEWIGVIWGSETTYYNSSLKSRVTISKDNSKNQVSLKLSSVTAADTAVYYCAKHYYYGGSYAMDYWGQGTLVTVSS

SEQ ID NO: 10 - protein, 247 aa, Artificial Sequence
  Description of Artificial Sequence: Synthetic polypeptide
QVQLQESGPGLVKPSETLSLTCTVSGVSLPDYGVSWIRQPPGKGLEWIGVIWGSETTYYNSSLKSRVTISKDNSKNQVSLKLSSVTAADTAVYYCAKHYYYGGSYAMDYWGQGTLVTVSSGGGGSGGGGSGGGGSGGGGSEIVMTQSPATLSLSPGERATLSCRASQDISKYLNWYQQKPGQAPRLLIYHTSRLHSGIPARFSGSGSGTDYTLTISSLQPEDFAVYFCQQGNTLPYTFGQGTKLEIK

SEQ ID NO: 11 - protein, 242 aa, Artificial Sequence
  Description of Artificial Sequence: Synthetic polypeptide
EIVMTQSPATLSLSPGERATLSCRASQDISKYLNWYQQKPGQAPRLLIYHTSRLHSGIPARFSGSGSGTDYTLTISSLQPEDFAVYFCQQGNTLPYTFGQGTKLEIKGGGGSGGGGSGGGGSQVQLQESGPGLVKPSETLSLTCTVSGVSLPDYGVSWIRQPPGKGLEWIGVIWGSETTYYNSSLKSRVTISKDNSKNQVSLKLSSVTAADTAVYYCAKHYYYGGSYAMDYWGQGTLVTVSS

SEQ ID NO: 12 - protein, 242 aa, Artificial Sequence
  Description of Artificial Sequence: Synthetic polypeptide
QVQLQESGPGLVKPSETLSLTCTVSGVSLPDYGVSWIRQPPGKGLEWIGVIWGSETTYYNSSLKSRVTISKDNSKNQVSLKLSSVTAADTAVYYCAKHYYYGGSYAMDYWGQGTLVTVSSGGGGSGGGGSGGGGSEIVMTQSPATLSLSPGERATLSCRASQDISKYLNWYQQKPGQAPRLLIYHTSRLHSGIPARFSGSGSGTDYTLTISSLQPEDFAVYFCQQGNTLPYTFGQGTKLEIK

SEQ ID NO: 13 - protein, 21 aa, Artificial Sequence
  Description of Artificial Sequence: Synthetic peptide
MALPVTALLLPLALLLHAARP

SEQ ID NO: 14 - protein, 45 aa, Artificial Sequence
  Description of Artificial Sequence: Synthetic polypeptide
TTTPAPRPPTPAPTIASQPLSLRPEACRPAAGGAVHTRGLDFACD

SEQ ID NO: 15 - protein, 24 aa, Artificial Sequence
  Description of Artificial Sequence: Synthetic peptide
IYIWAPLAGTCGVLLLSLVITLYC

SEQ ID NO: 16 - protein, 42 aa, Artificial Sequence
  Description of Artificial Sequence: Synthetic polypeptide
KRGRKKLLYIFKQPFMRPVQTTQEEDGCSCRFPEEEEGGCEL

SEQ ID NO: 17 - protein, 112 aa, Artificial Sequence
  Description of Artificial Sequence: Synthetic polypeptide
RVKFSRSADAPAYKQGQNQLYNELNLGRREEYDVLDKRRGRDPEMGGKPRRKNPQEGLYNELQKDKMAEAYSEIGMKGERRRGKGHDGLYQGLSTATKDTYDALHMQALPPR

SEQ ID NO: 18 - skipped

SEQ ID NO: 19 - protein, 10 aa, Artificial Sequence
  Description of Artificial Sequence: Synthetic peptide
GVSLPDYGVS

SEQ ID NO: 20 - protein, 16 aa, Artificial Sequence
  Description of Artificial Sequence: Synthetic peptide
VIWGSETTYYNSALKS

SEQ ID NO: 21 - protein, 16 aa, Artificial Sequence
  Description of Artificial Sequence: Synthetic peptide
VIWGSETTYYSSSLKS

SEQ ID NO: 22 - protein, 16 aa, Artificial Sequence
  Description of Artificial Sequence: Synthetic peptide
VIWGSETTYYQSSLKS

SEQ ID NO: 23 - protein, 16 aa, Artificial Sequence
  Description of Artificial Sequence: Synthetic peptide
VIWGSETTYYNSSLKS

SEQ ID NO: 24 - protein, 12 aa, Artificial Sequence
  Description of Artificial Sequence: Synthetic peptide
HYYYGGSYAMDY

SEQ ID NO: 25 - protein, 11 aa, Artificial Sequence
  Description of Artificial Sequence: Synthetic peptide
RASQDISKYLN

SEQ ID NO: 26 - protein, 7 aa, Artificial Sequence
  Description of Artificial Sequence: Synthetic peptide
HTSRLHS

SEQ ID NO: 27 - protein, 9 aa, Artificial Sequence
  Description of Artificial Sequence: Synthetic peptide
QQGNTLPYT

SEQ ID NO: 28 - RNA, 5000 nt, Artificial Sequence
  Description of Artificial Sequence: Synthetic polynucleotide
  misc_feature (1)..(5000): This sequence may encompass 50-5000 nucleotides
  See specification as filed for detailed description of substitutions and preferred embodiments
aaaaaaaaaaaaaaaaaaaaaaaaaaaaaaaaaaaaaaaaaaaaaaaaaaaaaaaaaaaaaaaaaaaaaaaaaaaaaaaaaaaaaaaaaaaaaaaaaaaaaaaaaaaaaaaaaaaaaaaaaaaaaaaaaaaaaaaaaaaaaaaaaaaaaaaaaaaaaaaaaaaaaaaaaaaaaaaaaaaaaaaaaaaaaaaaaaaaaaaaaaaaaaaaaaaaaaaaaaaaaaaaaaaaaaaaaaaaaaaaaaaaaaaaaaaaaaaaaaaaaaaaaaaaaaaaaaaaaaaaaaaaaaaaaaaaaaaaaaaaaaaaaaaaaaaaaaaaaaaaaaaaaaaaaaaaaaaaaaaaaaaaaaaaaaaaaaaaaaaaaaaaaaaaaaaaaaaaaaaaaaaaaaaaaaaaaaaaaaaaaaaaaaaaaaaaaaaaaaaaaaaaaaaaaaaaaaaaaaaaaaaaaaaaaaaaaaaaaaaaaaaaaaaaaaaaaaaaaaaaaaaaaaaaaaaaaaaaaaaaaaaaaaaaaaaaaaaaaaaaaaaaaaaaaaaaaaaaaaaaaaaaaaaaaaaaaaaaaaaaaaaaaaaaaaaaaaaaaaaaaaaaaaaaaaaaaaaaaaaaaaaaaaaaaaaaaaaaaaaaaaaaaaaaaaaaaaaaaaaaaaaaaaaaaaaaaaaaaaaaaaaaaaaaaaaaaaaaaaaaaaaaaaaaaaaaaaaaaaaaaaaaaaaaaaaaaaaaaaaaaaaaaaaaaaaaaaaaaaaaaaaaaaaaaaaaaaaaaaaaaaaaaaaaaaaaaaaaaaaaaaaaaaaaaaaaaaaaaaaaaaaaaaaaaaaaaaaaaaaaaaaaaaaaaaaaaaaaaaaaaaaaaaaaaaaaaaaaaaaaaaaaaaaaaaaaaaaaaaaaaaaaaaaaaaaaaaaaaaaaaaaaaaaaaaaaaaaaaaaaaaaaaaaaaaaaaaaaaaaaaaaaaaaaaaaaaaaaaaaaaaaaaaaaaaaaaaaaaaaaaaaaaaaaaaaaaaaaaaaaaaaaaaaaaaaaaaaaaaaaaaaaaaaaaaaaaaaaaaaaaaaaaaaaaaaaaaaaaaaaaaaaaaaaaaaaaaaaaaaaaaaaaaaaaaaaaaaaaaaaaaaaaaaaaaaaaaaaaaaaaaaaaaaaaaaaaaaaaaaaaaaaaaaaaaaaaaaaaaaaaaaaaaaaaaaaaaaaaaaaaaaaaaaaaaaaaaaaaaaaaaaaaaaaaaaaaaaaaaaaaaaaaaaaaaaaaaaaaaaaaaaaaaaaaaaaaaaaaaaaaaaaaaaaaaaaaaaaaaaaaaaaaaaaaaaaaaaaaaaaaaaaaaaaaaaaaaaaaaaaaaaaaaaaaaaaaaaaaaaaaaaaaaaaaaaaaaaaaaaaaaaaaaaaaaaaaaaaaaaaaaaaaaaaaaaaaaaaaaaaaaaaaaaaaaaaaaaaaaaaaaaaaaaaaaaaaaaaaaaaaaaaaaaaaaaaaaaaaaaaaaaaaaaaaaaaaaaaaaaaaaaaaaaaaaaaaaaaaaaaaaaaaaaaaaaaaaaaaaaaaaaaaaaaaaaaaaaaaaaaaaaaaaaaaaaaaaaaaaaaaaaaaaaaaaaaaaaaaaaaaaaaaaaaaaaaaaaaaaaaaaaaaaaaaaaaaaaaaaaaaaaaaaaaaaaaaaaaaaaaaaaaaaaaaaaaaaaaaaaaaaaaaaaaaaaaaaaaaaaaaaaaaaaaaaaaaaaaaaaaaaaaaaaaaaaaaaaaaaaaaaaaaaaaaaaaaaaaaaaaaaaaaaaaaaaaaaaaaaaaaaaaaaaaaaaaaaaaaaaaaaaaaaaaaaaaaaaaaaaaaaaaaaaaaaaaaaaaaaaaaaaaaaaaaaaaaaaaaaaaaaaaaaaaaaaaaaaaaaaaaaaaaaaaaaaaaaaaaaaaaaaaaaaaaaaaaaaaaaaaaaaaaaaaaaaaaaaaaaaaaaaaaaaaaaaaaaaaaaaaaaaaaaaaaaaaaaaaaaaaaaaaaaaaaaaaaaaaaaaaaaaaaaaaaaaaaaaaaaaaaaaaaaaaaaaaaaaaaaaaaaaaaaaaaaaaaaaaaaaaaaaaaaaaaaaaaaaaaaaaaaaaaaaaaaaaaaaaaaaaaaaaaaaaaaaaaaaaaaaaaaaaaaaaaaaaaaaaaaaaaaaaaaaaaaaaaaaaaaaaaaaaaaaaaaaaaaaaaaaaaaaaaaaaaaaaaaaaaaaaaaaaaaaaaaaaaaaaaaaaaaaaaaaaaaaaaaaaaaaaaaaaaaaaaaaaaaaaaaaaaaaaaaaaaaaaaaaaaaaaaaaaaaaaaaaaaaaaaaaaaaaaaaaaaaaaaaaaaaaaaaaaaaaaaaaaaaaaaaaaaaaaaaaaaaaaaaaaaaaaaaaaaaaaaaaaaaaaaaaaaaaaaaaaaaaaaaaaaaaaaaaaaaaaaaaaaaaaaaaaaaaaaaaaaaaaaaaaaaaaaaaaaaaaaaaaaaaaaaaaaaaaaaaaaaaaaaaaaaaaaaaaaaaaaaaaaaaaaaaaaaaaaaaaaaaaaaaaaaaaaaaaaaaaaaaaaaaaaaaaaaaaaaaaaaaaaaaaaaaaaaaaaaaaaaaaaaaaaaaaaaaaaaaaaaaaaaaaaaaaaaaaaaaaaaaaaaaaaaaaaaaaaaaaaaaaaaaaaaaaaaaaaaaaaaaaaaaaaaaaaaaaaaaaaaaaaaaaaaaaaaaaaaaaaaaaaaaaaaaaaaaaaaaaaaaaaaaaaaaaaaaaaaaaaaaaaaaaaaaaaaaaaaaaaaaaaaaaaaaaaaaaaaaaaaaaaaaaaaaaaaaaaaaaaaaaaaaaaaaaaaaaaaaaaaaaaaaaaaaaaaaaaaaaaaaaaaaaaaaaaaaaaaaaaaaaaaaaaaaaaaaaaaaaaaaaaaaaaaaaaaaaaaaaaaaaaaaaaaaaaaaaaaaaaaaaaaaaaaaaaaaaaaaaaaaaaaaaaaaaaaaaaaaaaaaaaaaaaaaaaaaaaaaaaaaaaaaaaaaaaaaaaaaaaaaaaaaaaaaaaaaaaaaaaaaaaaaaaaaaaaaaaaaaaaaaaaaaaaaaaaaaaaaaaaaaaaaaaaaaaaaaaaaaaaaaaaaaaaaaaaaaaaaaaaaaaaaaaaaaaaaaaaaaaaaaaaaaaaaaaaaaaaaaaaaaaaaaaaaaaaaaaaaaaaaaaaaaaaaaaaaaaaaaaaaaaaaaaaaaaaaaaaaaaaaaaaaaaaaaaaaaaaaaaaaaaaaaaaaaaaaaaaaaaaaaaaaaaaaaaaaaaaaaaaaaaaaaaaaaaaaaaaaaaaaaaaaaaaaaaaaaaaaaaaaaaaaaaaaaaaaaaaaaaaaaaaaaaaaaaaaaaaaaaaaaaaaaaaaaaaaaaaaaaaaaaaaaaaaaaaaaaaaaaaaaaaaaaaaaaaaaaaaaaaaaaaaaaaaaaaaaaaaaaaaaaaaaaaaaaaaaaaaaaaaaaaaaaaaaaaaaaaaaaaaaaaaaaaaaaaaaaaaaaaaaaaaaaaaaaaaaaaaaaaaaaaaaaaaaaaaaaaaaaaaaaaaaaaaaaaaaaaaaaaaaaaaaaaaaaaaaaaaaaaaaaaaaaaaaaaaaaaaaaaaaaaaaaaaaaaaaaaaaaaaaaaaaaaaaaaaaaaaaaaaaaaaaaaaaaaaaaaaaaaaaaaaaaaaaaaaaaaaaaaaaaaaaaaaaaaaaaaaaaaaaaaaaaaaaaaaaaaaaaaaaaaaaaaaaaaaaaaaaaaaaaaaaaaaaaaaaaaaaaaaaaaaaaaaaaaaaaaaaaaaaaaaaaaaaaaaaaaaaaaaaaaaaaaaaaaaaaaaaaaaaaaaaaaaaaaaaaaaaaaaaaaaaaaaaaaaaaaaaaaaaaaaaaaaaaaaaaaaaaaaaaaaaaaaaaaaaaaaaaaaaaaaaaaaaaaaaaaaaaaaaaaaaaaaaaaaaaaaaaaaaaaaaaaaaaaaaaaaaaaaaaaaaaaaaaaaaaaaaaaaaaaaaaaaaaaaaaaaaaaaaaaaaaaaaaaaaaaaaaaaaaaaaaaaaaaaaaaaaaaaaaaaaaaaaaaaaaaaaaaaaaaaaaaaaaaaaaaaaaaaaaaaaaaaaaaaaaaaaaaaaaaaaaaaaaaaaaaaaaaaaaaaaaaaaaaaaaaaaaaaaaaaaaaaaaaaaaaaaaaaaaaaaaaaaaaaaaaaaaaaaaaaaaaaaaaaaaaaaaaaaaaaaaaaaaaaaaaaaaaaaaaaaaaaaaaaaaaaaaaaaaaaaaaaaaaaaaaaaaaaaaaaaaaaaaaaaaaaaaaaaaaaaaaaaaaaaaaaaaaaaaaaaaaaaaaaaaaaaaaaaaaaaaaaaaaaaaaaaaaaaaaaaaaaaaaaaaaaaaaaaaaaaaaaaaaaaaaaaaaaaaaaaaaaaaaaaaaaaaaaaaaaaaaaaaaaaaaaaaaaaaaaaaaaaaaaaaaaaaaaaaaaaaaaaaaaaaaaaaaaaaaaaaaaaaaaaaaaaaaaaaaaaaaaaaaaaaaaaaaaaaaaaaaaaaaaaaaaaaaaaaaaaaaaaaaaaaaaaaaaaaaaaaaaaaaaaaaaaaaaaaaaaaaaaaaaaaaaaaaaaaaaaaaaaaaaaaaaaaaaaaaaaaaaaaaaaaaaaaaaaaaaaaaaaaaaaaaaaaaaaaaaaaaaaaaaaaaaaaaaaaaaaaaaaaaaaaaaaaaaaaaaaaaaaaaaaaaaaaaaaaaaaaaaaaaaaaaaaaaaaaaaaaaaaaaaaaaaaaaaaaaaaaaaaaaaaaaaaaaaaaaaaaaaaaaaaaaaaaaaaaaaaaaaaaaaaaaaaaaaaaaaaaaaaaaaaaaaaaaaaaaaaaaaaaaaaaaaaaaaaaaaaaaaaaaaaaaaaaaaaaaaaaaaaaaaaaaaaaaaaaaaaaaaaaaaaaaaaaaaaaaaaaaaaaaaaaaaaaaaaaaaaaaaaaaaaaaaaaaaaaaaaaaaaaaaaaaaaaaaaaaaaaaaaaaaaaaaaaaaaaaaaaaaaaaaaaaaaaaaaaaaaaaaaaaaaaaaaaaaaaaaaaaaaaaaaaaaaaaaaaaaaaaaa

SEQ ID NO: 29 - protein, 20 aa, Artificial Sequence
  Description of Artificial Sequence: Synthetic peptide
GGGGSGGGGSGGGGSGGGGS

SEQ ID NO: 30 - protein, 15 aa, Artificial Sequence
  Description of Artificial Sequence: Synthetic peptide
GGGGSGGGGSGGGGS

SEQ ID NO: 31 - protein, 486 aa, Artificial Sequence
  Description of Artificial Sequence: Synthetic polypeptide
MALPVTALLLPLALLLHAARPEIVMTQSPATLSLSPGERATLSCRASQDISKYLNWYQQKPGQAPRLLIYHTSRLHSGIPARFSGSGSGTDYTLTISSLQPEDFAVYFCQQGNTLPYTFGQGTKLEIKGGGGSGGGGSGGGGSQVQLQESGPGLVKPSETLSLTCTVSGVSLPDYGVSWIRQPPGKGLEWIGVIWGSETTYYSSSLKSRVTISKDNSKNQVSLKLSSVTAADTAVYYCAKHYYYGGSYAMDYWGQGTLVTVSSTTTPAPRPPTPAPTIASQPLSLRPEACRPAAGGAVHTRGLDFACDIYIWAPLAGTCGVLLLSLVITLYCKRGRKKLLYIFKQPFMRPVQTTQEEDGCSCRFPEEEEGGCELRVKFSRSADAPAYKQGQNQLYNELNLGRREEYDVLDKRRGRDPEMGGKPRRKNPQEGLYNELQKDKMAEAYSEIGMKGERRRGKGHDGLYQGLSTATKDTYDALHMQALPPR

SEQ ID NO: 32 - protein, 486 aa, Artificial Sequence
  Description of Artificial Sequence: Synthetic polypeptide
MALPVTALLLPLALLLHAARPEIVMTQSPATLSLSPGERATLSCRASQDISKYLNWYQQKPGQAPRLLIYHTSRLHSGIPARFSGSGSGTDYTLTISSLQPEDFAVYFCQQGNTLPYTFGQGTKLEIKGGGGSGGGGSGGGGSQVQLQESGPGLVKPSETLSLTCTVSGVSLPDYGVSWIRQPPGKGLEWIGVIWGSETTYYQSSLKSRVTISKDNSKNQVSLKLSSVTAADTAVYYCAKHYYYGGSYAMDYWGQGTLVTVSSTTTPAPRPPTPAPTIASQPLSLRPEACRPAAGGAVHTRGLDFACDIYIWAPLAGTCGVLLLSLVITLYCKRGRKKLLYIFKQPFMRPVQTTQEEDGCSCRFPEEEEGGCELRVKFSRSADAPAYKQGQNQLYNELNLGRREEYDVLDKRRGRDPEMGGKPRRKNPQEGLYNELQKDKMAEAYSEIGMKGERRRGKGHDGLYQGLSTATKDTYDALHMQALPPR

SEQ ID NO: 33 - protein, 486 aa, Artificial Sequence
  Description of Artificial Sequence: Synthetic polypeptide
MALPVTALLLPLALLLHAARPQVQLQESGPGLVKPSETLSLTCTVSGVSLPDYGVSWIRQPPGKGLEWIGVIWGSETTYYSSSLKSRVTISKDNSKNQVSLKLSSVTAADTAVYYCAKHYYYGGSYAMDYWGQGTLVTVSSGGGGSGGGGSGGGGSEIVMTQSPATLSLSPGERATLSCRASQDISKYLNWYQQKPGQAPRLLIYHTSRLHSGIPARFSGSGSGTDYTLTISSLQPEDFAVYFCQQGNTLPYTFGQGTKLEIKTTTPAPRPPTPAPTIASQPLSLRPEACRPAAGGAVHTRGLDFACDIYIWAPLAGTCGVLLLSLVITLYCKRGRKKLLYIFKQPFMRPVQTTQEEDGCSCRFPEEEEGGCELRVKFSRSADAPAYKQGQNQLYNELNLGRREEYDVLDKRRGRDPEMGGKPRRKNPQEGLYNELQKDKMAEAYSEIGMKGERRRGKGHDGLYQGLSTATKDTYDALHMQALPPR

SEQ ID NO: 34 - protein, 486 aa, Artificial Sequence
  Description of Artificial Sequence: Synthetic polypeptide
MALPVTALLLPLALLLHAARPQVQLQESGPGLVKPSETLSLTCTVSGVSLPDYGVSWIRQPPGKGLEWIGVIWGSETTYYQSSLKSRVTISKDNSKNQVSLKLSSVTAADTAVYYCAKHYYYGGSYAMDYWGQGTLVTVSSGGGGSGGGGSGGGGSEIVMTQSPATLSLSPGERATLSCRASQDISKYLNWYQQKPGQAPRLLIYHTSRLHSGIPARFSGSGSGTDYTLTISSLQPEDFAVYFCQQGNTLPYTFGQGTKLEIKTTTPAPRPPTPAPTIASQPLSLRPEACRPAAGGAVHTRGLDFACDIYIWAPLAGTCGVLLLSLVITLYCKRGRKKLLYIFKQPFMRPVQTTQEEDGCSCRFPEEEEGGCELRVKFSRSADAPAYKQGQNQLYNELNLGRREEYDVLDKRRGRDPEMGGKPRRKNPQEGLYNELQKDKMAEAYSEIGMKGERRRGKGHDGLYQGLSTATKDTYDALHMQALPPR

SEQ ID NO: 35 - protein, 491 aa, Artificial Sequence
  Description of Artificial Sequence: Synthetic polypeptide
MALPVTALLLPLALLLHAARPEIVMTQSPATLSLSPGERATLSCRASQDISKYLNWYQQKPGQAPRLLIYHTSRLHSGIPARFSGSGSGTDYTLTISSLQPEDFAVYFCQQGNTLPYTFGQGTKLEIKGGGGSGGGGSGGGGSGGGGSQVQLQESGPGLVKPSETLSLTCTVSGVSLPDYGVSWIRQPPGKGLEWIGVIWGSETTYYSSSLKSRVTISKDNSKNQVSLKLSSVTAADTAVYYCAKHYYYGGSYAMDYWGQGTLVTVSSTTTPAPRPPTPAPTIASQPLSLRPEACRPAAGGAVHTRGLDFACDIYIWAPLAGTCGVLLLSLVITLYCKRGRKKLLYIFKQPFMRPVQTTQEEDGCSCRFPEEEEGGCELRVKFSRSADAPAYKQGQNQLYNELNLGRREEYDVLDKRRGRDPEMGGKPRRKNPQEGLYNELQKDKMAEAYSEIGMKGERRRGKGHDGLYQGLSTATKDTYDALHMQALPPR

SEQ ID NO: 36 - protein, 491 aa, Artificial Sequence
  Description of Artificial Sequence: Synthetic polypeptide
MALPVTALLLPLALLLHAARPEIVMTQSPATLSLSPGERATLSCRASQDISKYLNWYQQKPGQAPRLLIYHTSRLHSGIPARFSGSGSGTDYTLTISSLQPEDFAVYFCQQGNTLPYTFGQGTKLEIKGGGGSGGGGSGGGGSGGGGSQVQLQESGPGLVKPSETLSLTCTVSGVSLPDYGVSWIRQPPGKGLEWIGVIWGSETTYYQSSLKSRVTISKDNSKNQVSLKLSSVTAADTAVYYCAKHYYYGGSYAMDYWGQGTLVTVSSTTTPAPRPPTPAPTIASQPLSLRPEACRPAAGGAVHTRGLDFACDIYIWAPLAGTCGVLLLSLVITLYCKRGRKKLLYIFKQPFMRPVQTTQEEDGCSCRFPEEEEGGCELRVKFSRSADAPAYKQGQNQLYNELNLGRREEYDVLDKRRGRDPEMGGKPRRKNPQEGLYNELQKDKMAEAYSEIGMKGERRRGKGHDGLYQGLSTATKDTYDALHMQALPPR

SEQ ID NO: 37 - protein, 491 aa, Artificial Sequence
  Description of Artificial Sequence: Synthetic polypeptide
MALPVTALLLPLALLLHAARPQVQLQESGPGLVKPSETLSLTCTVSGVSLPDYGVSWIRQPPGKGLEWIGVIWGSETTYYSSSLKSRVTISKDNSKNQVSLKLSSVTAADTAVYYCAKHYYYGGSYAMDYWGQGTLVTVSSGGGGSGGGGSGGGGSGGGGSEIVMTQSPATLSLSPGERATLSCRASQDISKYLNWYQQKPGQAPRLLIYHTSRLHSGIPARFSGSGSGTDYTLTISSLQPEDFAVYFCQQGNTLPYTFGQGTKLEIKTTTPAPRPPTPAPTIASQPLSLRPEACRPAAGGAVHTRGLDFACDIYIWAPLAGTCGVLLLSLVITLYCKRGRKKLLYIFKQPFMRPVQTTQEEDGCSCRFPEEEEGGCELRVKFSRSADAPAYKQGQNQLYNELNLGRREEYDVLDKRRGRDPEMGGKPRRKNPQEGLYNELQKDKMAEAYSEIGMKGERRRGKGHDGLYQGLSTATKDTYDALHMQALPPR

SEQ ID NO: 38 - protein, 491 aa, Artificial Sequence
  Description of Artificial Sequence: Synthetic polypeptide
MALPVTALLLPLALLLHAARPQVQLQESGPGLVKPSETLSLTCTVSGVSLPDYGVSWIRQPPGKGLEWIGVIWGSETTYYQSSLKSRVTISKDNSKNQVSLKLSSVTAADTAVYYCAKHYYYGGSYAMDYWGQGTLVTVSSGGGGSGGGGSGGGGSGGGGSEIVMTQSPATLSLSPGERATLSCRASQDISKYLNWYQQKPGQAPRLLIYHTSRLHSGIPARFSGSGSGTDYTLTISSLQPEDFAVYFCQQGNTLPYTFGQGTKLEIKTTTPAPRPPTPAPTIASQPLSLRPEACRPAAGGAVHTRGLDFACDIYIWAPLAGTCGVLLLSLVITLYCKRGRKKLLYIFKQPFMRPVQTTQEEDGCSCRFPEEEEGGCELRVKFSRSADAPAYKQGQNQLYNELNLGRREEYDVLDKRRGRDPEMGGKPRRKNPQEGLYNELQKDKMAEAYSEIGMKGERRRGKGHDGLYQGLSTATKDTYDALHMQALPPR

SEQ ID NO: 39 - protein, 491 aa, Artificial Sequence
  Description of Artificial Sequence: Synthetic polypeptide
MALPVTALLLPLALLLHAARPEIVMTQSPATLSLSPGERATLSCRASQDISKYLNWYQQKPGQAPRLLIYHTSRLHSGIPARFSGSGSGTDYTLTISSLQPEDFAVYFCQQGNTLPYTFGQGTKLEIKGGGGSGGGGSGGGGSGGGGSQVQLQESGPGLVKPSETLSLTCTVSGVSLPDYGVSWIRQPPGKGLEWIGVIWGSETTYYNSSLKSRVTISKDNSKNQVSLKLSSVTAADTAVYYCAKHYYYGGSYAMDYWGQGTLVTVSSTTTPAPRPPTPAPTIASQPLSLRPEACRPAAGGAVHTRGLDFACDIYIWAPLAGTCGVLLLSLVITLYCKRGRKKLLYIFKQPFMRPVQTTQEEDGCSCRFPEEEEGGCELRVKFSRSADAPAYKQGQNQLYNELNLGRREEYDVLDKRRGRDPEMGGKPRRKNPQEGLYNELQKDKMAEAYSEIGMKGERRRGKGHDGLYQGLSTATKDTYDALHMQALPPR

SEQ ID NO: 40 - protein, 491 aa, Artificial Sequence; identical to SEQ ID NO: 39
  Description of Artificial Sequence: Synthetic polypeptide

SEQ ID NO: 41 - protein, 491 aa, Artificial Sequence
  Description of Artificial Sequence: Synthetic polypeptide
MALPVTALLLPLALLLHAARPQVQLQESGPGLVKPSETLSLTCTVSGVSLPDYGVSWIRQPPGKGLEWIGVIWGSETTYYNSSLKSRVTISKDNSKNQVSLKLSSVTAADTAVYYCAKHYYYGGSYAMDYWGQGTLVTVSSGGGGSGGGGSGGGGSGGGGSEIVMTQSPATLSLSPGERATLSCRASQDISKYLNWYQQKPGQAPRLLIYHTSRLHSGIPARFSGSGSGTDYTLTISSLQPEDFAVYFCQQGNTLPYTFGQGTKLEIKTTTPAPRPPTPAPTIASQPLSLRPEACRPAAGGAVHTRGLDFACDIYIWAPLAGTCGVLLLSLVITLYCKRGRKKLLYIFKQPFMRPVQTTQEEDGCSCRFPEEEEGGCELRVKFSRSADAPAYKQGQNQLYNELNLGRREEYDVLDKRRGRDPEMGGKPRRKNPQEGLYNELQKDKMAEAYSEIGMKGERRRGKGHDGLYQGLSTATKDTYDALHMQALPPR

SEQ ID NO: 42 - protein, 486 aa, Artificial Sequence
  Description of Artificial Sequence: Synthetic polypeptide
MALPVTALLLPLALLLHAARPEIVMTQSPATLSLSPGERATLSCRASQDISKYLNWYQQKPGQAPRLLIYHTSRLHSGIPARFSGSGSGTDYTLTISSLQPEDFAVYFCQQGNTLPYTFGQGTKLEIKGGGGSGGGGSGGGGSQVQLQESGPGLVKPSETLSLTCTVSGVSLPDYGVSWIRQPPGKGLEWIGVIWGSETTYYNSSLKSRVTISKDNSKNQVSLKLSSVTAADTAVYYCAKHYYYGGSYAMDYWGQGTLVTVSSTTTPAPRPPTPAPTIASQPLSLRPEACRPAAGGAVHTRGLDFACDIYIWAPLAGTCGVLLLSLVITLYCKRGRKKLLYIFKQPFMRPVQTTQEEDGCSCRFPEEEEGGCELRVKFSRSADAPAYKQGQNQLYNELNLGRREEYDVLDKRRGRDPEMGGKPRRKNPQEGLYNELQKDKMAEAYSEIGMKGERRRGKGHDGLYQGLSTATKDTYDALHMQALPPR

SEQ ID NO: 43 - protein, 112 aa, Homo sapiens
RVKFSRSADAPAYQQGQNQLYNELNLGRREEYDVLDKRRGRDPEMGGKPRRKNPQEGLYNELQKDKMAEAYSEIGMKGERRRGKGHDGLYQGLSTATKDTYDALHMQALPPR

SEQ ID NO: 44 - DNA, 336 bp, Homo sapiens
agagtgaagttcagcaggagcgcagacgcccccgcgtaccagcagggccagaaccagctctataacgagctcaatctaggacgaagagaggagtacgatgttttggacaagagacgtggccgggaccctgagatggggggaaagccgagaaggaagaaccctcaggaaggcctgtacaatgaactgcagaaagataagatggcggaggcctacagtgagattgggatgaaaggcgagcgccggaggggcaaggggcacgatggcctttaccagggtctcagtacagccaccaaggacacctacgacgcccttcacatgcaggccctgccccctcgc

SEQ ID NO: 45 - protein, 230 aa, Artificial Sequence
  Description of Artificial Sequence: Synthetic polypeptide
ESKYGPPCPPCPAPEFLGGPSVFLFPPKPKDTLMISRTPEVTCVVVDVSQEDPEVQFNWYVDGVEVHNAKTKPREEQFNSTYRVVSVLTVLHQDWLNGKEYKCKVSNKGLPSSIEKTISKAKGQPREPQVYTLPPSQEEMTKNQVSLTCLVKGFYPSDIAVEWESNGQPENNYKTTPPVLDSDGSFFLYSRLTVDKSRWQEGNVFSCSVMHEALHNHYTQKSLSLSLGKM

SEQ ID NO: 46 - DNA, 690 bp, Artificial Sequence
  Description of Artificial Sequence: Synthetic polynucleotide
gagagcaagtacggccctccctgccccccttgccctgcccccgagttcctgggcggacccagcgtgttcctgttcccccccaagcccaaggacaccctgatgatcagccggacccccgaggtgacctgtgtggtggtggacgtgtcccaggaggaccccgaggtccagttcaactggtacgtggacggcgtggaggtgcacaacgccaagaccaagccccgggaggagcagttcaatagcacctaccgggtggtgtccgtgctgaccgtgctgcaccaggactggctgaacggcaaggaatacaagtgtaaggtgtccaacaagggcctgcccagcagcatcgagaaaaccatcagcaaggccaagggccagcctcgggagccccaggtgtacaccctgccccctagccaagaggagatgaccaagaaccaggtgtccctgacctgcctggtgaagggcttctaccccagcgacatcgccgtggagtgggagagcaacggccagcccgagaacaactacaagaccaccccccctgtgctggacagcgacggcagcttcttcctgtacagccggctgaccgtggacaagagccggtggcaggagggcaacgtctttagctgctccgtgatgcacgaggccctgcacaaccactacacccagaagagcctgagcctgtccctgggcaagatg

SEQ ID NO: 47 - protein, 282 aa, Artificial Sequence
  Description of Artificial Sequence: Synthetic polypeptide
RWPESPKAQASSVPTAQPQAEGSLAKATTAPATTRNTGRGGEEKKKEKEKEEQEERETKTPECPSHTQPLGVYLLTPAVQDLWLRDKATFTCFVVGSDLKDAHLTWEVAGKVPTGGVEEGLLERHSNGSQSQHSRLTLPRSLWNAGTSVTCTLNHPSLPPQRLMALREPAAQAPVKLSLNLLASSDPPEAASWLLCEVSGFSPPNILLMWLEDQREVNTSGFAPARPPPQPGSTTFWAWSVLRVPAPPSPQPATYTCVVSHEDSRTLLNASRSLEVSYVTDH

SEQ ID NO: 48 - DNA, 847 bp, Artificial Sequence
  Description of Artificial Sequence: Synthetic polynucleotide
aggtggcccgaaagtcccaaggcccaggcatctagtgttcctactgcacagccccaggcagaaggcagcctagccaaagctactactgcacctgccactacgcgcaatactggccgtggcggggaggagaagaaaaaggagaaagagaaagaagaacaggaagagagggagaccaagacccctgaatgtccatcccatacccagccgctgggcgtctatctcttgactcccgcagtacaggacttgtggcttagagataaggccacctttacatgtttcgtcgtgggctctgacctgaaggatgcccatttgacttgggaggttgccggaaaggtacccacagggggggttgaggaagggttgctggagcgccattccaatggctctcagagccagcactcaagactcacccttccgagatccctgtggaacgccgggacctctgtcacatgtactctaaatcatcctagcctgcccccacagcgtctgatggcccttagagagccagccgcccaggcaccagttaagcttagcctgaatctgctcgccagtagtgatcccccagaggccgccagctggctcttatgcgaagtgtccggctttagcccgcccaacatcttgctcatgtggctggaggaccagcgagaagtgaacaccagcggcttcgctccagcccggcccccaccccagccgggttctaccacattctgggcctggagtgtcttaagggtcccagcaccacctagcccccagccagccacatacacctgtgttgtgtcccatgaagatagcaggaccctgctaaatgcttctaggagtctggaggtttcctacgtgactgaccatt

SEQ ID NO: 49 - protein, 10 aa, Artificial Sequence
  Description of Artificial Sequence: Synthetic peptide
GGGGSGGGGS

SEQ ID NO: 50 - DNA, 30 bp, Artificial Sequence
  Description of Artificial Sequence: Synthetic oligonucleotide
ggtggcggaggttctggaggtggaggttcc

SEQ ID NO: 51 - protein, 48 aa, Artificial Sequence
  Description of Artificial Sequence: Synthetic polypeptide
QRRKYRSNKGESPVEPAEPCRYSCPREEEGSTIPIQEDYRKPEPACSP

SEQ ID NO: 52 - DNA, 123 bp, Artificial Sequence
  Description of Artificial Sequence: Synthetic polynucleotide
aggagtaagaggagcaggctcctgcacagtgactacatgaacatgactccccgccgccccgggcccacccgcaagcattaccagccctatgccccaccacgcgacttcgcagcctatcgctcc

SEQ ID NO: 53 - protein, 30 aa, Artificial Sequence
  Description of Artificial Sequence: Synthetic polypeptide
  MISC_FEATURE (1)..(30): This sequence may encompass 1-6 "Gly Gly Gly Gly Ser" repeating units
  See specification as filed for detailed description of substitutions and preferred embodiments
GGGGSGGGGSGGGGSGGGGSGGGGSGGGGS

SEQ ID NO: 54 - DNA, 63 bp, Artificial Sequence
  Description of Artificial Sequence: Synthetic oligonucleotide
atggccctgcctgtgacagccctgctgctgcctctggctctgctgctgcatgccgctagaccc

SEQ ID NO: 55 - DNA, 135 bp, Artificial Sequence
  Description of Artificial Sequence: Synthetic polynucleotide
accacgacgccagcgccgcgaccaccaacaccggcgcccaccatcgcgtcgcagcccctgtccctgcgcccagaggcgtgccggccagcggcggggggcgcagtgcacacgagggggctggacttcgcctgtgat

SEQ ID NO: 56 - DNA, 72 bp, Artificial Sequence
  Description of Artificial Sequence: Synthetic oligonucleotide
atctacatctgggcgcccttggccgggacttgtggggtccttctcctgtcactggttatcaccctttactgc

SEQ ID NO: 57 - skipped

SEQ ID NO: 58 - protein, 486 aa, Artificial Sequence
  Description of Artificial Sequence: Synthetic polypeptide
MALPVTALLLPLALLLHAARPDIQMTQTTSSLSASLGDRVTISCRASQDISKYLNWYQQKPDGTVKLLIYHTSRLHSGVPSRFSGSGSGTDYSLTISNLEQEDIATYFCQQGNTLPYTFGGGTKLEITGGGGSGGGGSGGGGSEVKLQESGPGLVAPSQSLSVTCTVSGVSLPDYGVSWIRQPPRKGLEWLGVIWGSETTYYNSALKSRLTIIKDNSKSQVFLKMNSLQTDDTAIYYCAKHYYYGGSYAMDYWGQGTSVTVSSTTTPAPRPPTPAPTIASQPLSLRPEACRPAAGGAVHTRGLDFACDIYIWAPLAGTCGVLLLSLVITLYCKRGRKKLLYIFKQPFMRPVQTTQEEDGCSCRFPEEEEGGCELRVKFSRSADAPAYKQGQNQLYNELNLGRREEYDVLDKRRGRDPEMGGKPRRKNPQEGLYNELQKDKMAEAYSEIGMKGERRRGKGHDGLYQGLSTATKDTYDALHMQALPPR

SEQ ID NO: 59 - protein, 242 aa, Artificial Sequence
  Description of Artificial Sequence: Synthetic polypeptide
DIQMTQTTSSLSASLGDRVTISCRASQDISKYLNWYQQKPDGTVKLLIYHTSRLHSGVPSRFSGSGSGTDYSLTISNLEQEDIATYFCQQGNTLPYTFGGGTKLEITGGGGSGGGGSGGGGSEVKLQESGPGLVAPSQSLSVTCTVSGVSLPDYGVSWIRQPPRKGLEWLGVIWGSETTYYNSALKSRLTIIKDNSKSQVFLKMNSLQTDDTAIYYCAKHYYYGGSYAMDYWGQGTSVTVSS

SEQ ID NO: 60 - DNA, 126 bp, Artificial Sequence
  Description of Artificial Sequence: Synthetic polynucleotide
aaacggggcagaaagaaactcctgtatatattcaaacaaccatttatgagaccagtacaaactactcaagaggaagatggctgtagctgccgatttccagaagaagaagaaggaggatgtgaactg

SEQ ID NO: 61 - DNA, 813 bp, Artificial Sequence
  Description of Artificial Sequence: Synthetic polynucleotide
atggccctccctgtcaccgccctgctgcttccgctggctcttctgctccacgccgctcggcccgaaattgtgatgacccagtcacccgccactcttagcctttcacccggtgagcgcgcaaccctgtcttgcagagcctcccaagacatctcaaaataccttaattggtatcaacagaagcccggacaggctcctcgccttctgatctaccacaccagccggctccattctggaatccctgccaggttcagcggtagcggatctgggaccgactacaccctcactatcagctcactgcagccagaggacttcgctgtctatttctgtcagcaagggaacaccctgccctacacctttggacagggcaccaagctcgagattaaaggtggaggtggcagcggaggaggtgggtccggcggtggaggaagccaggtccaactccaagaaagcggaccgggtcttgtgaagccatcagaaactctttcactgacttgtactgtgagcggagtgtctctccccgattacggggtgtcttggatcagacagccaccggggaagggtctggaatggattggagtgatttggggctctgagactacttactactcttcatccctcaagtcacgcgtcaccatctcaaaggacaactctaagaatcaggtgtcactgaaactgtcatctgtgaccgcagccgacaccgccgtgtactattgcgctaagcattactattatggcgggagctacgcaatggattactggggacagggtactctggtcaccgtgtccagccaccaccatcatcaccatcaccat

SEQ ID NO: 62 - DNA, 813 bp, Artificial Sequence
  Description of Artificial Sequence: Synthetic polynucleotide
atggccctccctgtcaccgccctgctgcttccgctggctcttctgctccacgccgctcggcccgaaattgtgatgacccagtcacccgccactcttagcctttcacccggtgagcgcgcaaccctgtcttgcagagcctcccaagacatctcaaaataccttaattggtatcaacagaagcccggacaggctcctcgccttctgatctaccacaccagccggctccattctggaatccctgccaggttcagcggtagcggatctgggaccgactacaccctcactatcagctcactgcagccagaggacttcgctgtctatttctgtcagcaagggaacaccctgccctacacctttggacagggcaccaagctcgagattaaaggtggaggtggcagcggaggaggtgggtccggcggtggaggaagccaggtccaactccaagaaagcggaccgggtcttgtgaagccatcagaaactctttcactgacttgtactgtgagcggagtgtctctccccgattacggggtgtcttggatcagacagccaccggggaagggtctggaatggattggagtgatttggggctctgagactacttactaccaatcatccctcaagtcacgcgtcaccatctcaaaggacaactctaagaatcaggtgtcactgaaactgtcatctgtgaccgcagccgacaccgccgtgtactattgcgctaagcattactattatggcgggagctacgcaatggattactggggacagggtactctggtcaccgtgtccagccaccaccatcatcaccatcaccat

SEQ ID NO: 63 - DNA, 813 bp, Artificial Sequence
  Description of Artificial Sequence: Synthetic polynucleotide
atggctctgcccgtgaccgcactcctcctgccactggctctgctgcttcacgccgctcgcccacaagtccagcttcaagaatcagggcctggtctggtgaagccatctgagactctgtccctcacttgcaccgtgagcggagtgtccctcccagactacggagtgagctggattagacagcctcccggaaagggactggagtggatcggagtgatttggggtagcgaaaccacttactattcatcttccctgaagtcacgggtcaccatttcaaaggataactcaaagaatcaagtgagcctcaagctctcatcagtcaccgccgctgacaccgccgtgtattactgtgccaagcattactactatggagggtcctacgccatggactactggggccagggaactctggtcactgtgtcatctggtggaggaggtagcggaggaggcgggagcggtggaggtggctccgaaatcgtgatgacccagagccctgcaaccctgtccctttctcccggggaacgggctaccctttcttgtcgggcatcacaagatatctcaaaatacctcaattggtatcaacagaagccgggacaggcccctaggcttcttatctaccacacctctcgcctgcatagcgggattcccgcacgctttagcgggtctggaagcgggaccgactacactctgaccatctcatctctccagcccgaggacttcgccgtctacttctgccagcagggtaacaccctgccgtacaccttcggccagggcaccaagcttgagatcaaacatcaccaccatcatcaccatcac

SEQ ID NO: 64 - DNA, 813 bp, Artificial Sequence
  Description of Artificial Sequence: Synthetic polynucleotide
atggctctgcccgtgaccgcactcctcctgccactggctctgctgcttcacgccgctcgcccacaagtccagcttcaagaatcagggcctggtctggtgaagccatctgagactctgtccctcacttgcaccgtgagcggagtgtccctcccagactacggagtgagctggattagacagcctcccggaaagggactggagtggatcggagtgatttggggtagcgaaaccacttactatcaatcttccctgaagtcacgggtcaccatttcaaaggataactcaaagaatcaagtgagcctcaagctctcatcagtcaccgccgctgacaccgccgtgtattactgtgccaagcattactactatggagggtcctacgccatggactactggggccagggaactctggtcactgtgtcatctggtggaggaggtagcggaggaggcgggagcggtggaggtggctccgaaatcgtgatgacccagagccctgcaaccctgtccctttctcccggggaacgggctaccctttcttgtcgggcatcacaagatatctcaaaatacctcaattggtatcaacagaagccgggacaggcccctaggcttcttatctaccacacctctcgcctgcatagcgggattcccgcacgctttagcgggtctggaagcgggaccgactacactctgaccatctcatctctccagcccgaggacttcgccgtctacttctgccagcagggtaacaccctgccgtacaccttcggccagggcaccaagcttgagatcaaacatcaccaccatcatcaccatcac

SEQ ID NO: 65 - DNA, 828 bp, Artificial Sequence
  Description of Artificial Sequence: Synthetic polynucleotide
atggccctcccagtgaccgctctgctgctgcctctcgcacttcttctccatgccgctcggcctgagatcgtcatgacccaaagccccgctaccctgtccctgtcacccggcgagagggcaaccctttcatgcagggccagccaggacatttctaagtacctcaactggtatcagcagaagccagggcaggctcctcgcctgctgatctaccacaccagccgcctccacagcggtatccccgccagattttccgggagcgggtctggaaccgactacaccctcaccatctcttctctgcagcccgaggatttcgccgtctatttctgccagcaggggaatactctgccgtacaccttcggtcaaggtaccaagctggaaatcaagggaggcggaggatcaggcggtggcggaagcggaggaggtggctccggaggaggaggttcccaagtgcagcttcaagaatcaggacccggacttgtgaagccatcagaaaccctctccctgacttgtaccgtgtccggtgtgagcctccccgactacggagtctcttggattcgccagcctccggggaagggtcttgaatggattggggtgatttggggatcagagactacttactactcttcatcacttaagtcacgggtcaccatcagcaaagataatagcaagaaccaagtgtcacttaagctgtcatctgtgaccgccgctgacaccgccgtgtactattgtgccaaacattactattacggagggtcttatgctatggactactggggacaggggaccctggtgactgtctctagccatcaccatcaccaccatcatcac

SEQ ID NO: 66 - DNA, 828 bp, Artificial Sequence
  Description of Artificial Sequence: Synthetic polynucleotide
atggccctcccagtgaccgctctgctgctgcctctcgcacttcttctccatgccgctcggcctgagatcgtcatgacccaaagccccgctaccctgtccctgtcacccggcgagagggcaaccctttcatgcagggccagccaggacatttctaagtacctcaactggtatcagcagaagccagggcaggctcctcgcctgctgatctaccacaccagccgcctccacagcggtatccccgccagattttccgggagcgggtctggaaccgactacaccctcaccatctcttctctgcagcccgaggatttcgccgtctatttctgccagcaggggaatactctgccgtacaccttcggtcaaggtaccaagctggaaatcaagggaggcggaggatcaggcggtggcggaagcggaggaggtggctccggaggaggaggttcccaagtgcagcttcaagaatcaggacccggacttgtgaagccatcagaaaccctctccctgacttgtaccgtgtccggtgtgagcctccccgactacggagtctcttggattcgccagcctccggggaagggtcttgaatggattggggtgatttggggatcagagactacttactaccagtcatcacttaagtcacgggtcaccatcagcaaagataatagcaagaaccaagtgtcacttaagctgtcatctgtgaccgccgctgacaccgccgtgtactattgtgccaaacattactattacggagggtcttatgctatggactactggggacaggggaccctggtgactgtctctagccatcaccatcaccaccatcatcac

SEQ ID NO: 67 - DNA, 828 bp, Artificial Sequence
  Description of Artificial Sequence: Synthetic polynucleotide
atggcactgcctgtcactgccctcctgctgcctctggccctccttctgcatgccgccaggccccaagtccagctgcaagagtcaggacccggactggtgaagccgtctgagactctctcactgacttgtaccgtcagcggcgtgtccctccccgactacggagtgtcatggatccgccaacctcccgggaaagggcttgaatggattggtgtcatctggggttctgaaaccacctactactcatcttccctgaagtccagggtgaccatcagcaaggataattccaagaaccaggtcagccttaagctgtcatctgtgaccgctgctgacaccgccgtgtattactgcgccaagcactactattacggaggaagctacgctatggactattggggacagggcactctcgtgactgtgagcagcggcggtggagggtctggaggtggaggatccggtggtggtgggtcaggcggaggagggagcgagattgtgatgactcagtcaccagccaccctttctctttcacccggcgagagagcaaccctgagctgtagagccagccaggacatttctaagtacctcaactggtatcagcaaaaaccggggcaggcccctcgcctcctgatctaccatacctcacgccttcactctggtatccccgctcggtttagcggatcaggatctggtaccgactacactctgaccatttccagcctgcagccagaagatttcgcagtgtatttctgccagcagggcaatacccttccttacaccttcggtcagggaaccaagctcgaaatcaagcaccatcaccatcatcaccaccat

SEQ ID NO: 68 - DNA, 828 bp, Artificial Sequence
  Description of Artificial Sequence: Synthetic polynucleotide
atggcactgcctgtcactgccctcctgctgcctctggccctccttctgcatgccgccaggccccaagtccagctgcaagagtcaggacccggactggtgaagccgtctgagactctctcactgacttgtaccgtcagcggcgtgtccctccccgactacggagtgtcatggatccgccaacctcccgggaaagggcttgaatggattggtgtcatctggggttctgaaaccacctactaccagtcttccctgaagtccagggtgaccatcagcaaggataattccaagaaccaggtcagccttaagctgtcatctgtgaccgctgctgacaccgccgtgtattactgcgccaagcactactattacggaggaagctacgctatggactattggggacagggcactctcgtgactgtgagcagcggcggtggagggtctggaggtggaggatccggtggtggtgggtcaggcggaggagggagcgagattgtgatgactcagtcaccagccaccctttctctttcacccggcgagagagcaaccctgagctgtagagccagccaggacatttctaagtacctcaactggtatcagcaaaaaccggggcaggcccctcgcctcctgatctaccatacctcacgccttcactctggtatccccgctcggtttagcggatcaggatctggtaccgactacactctgaccatttccagcctgcagccagaagatttcgcagtgtatttctgccagcagggcaatacccttccttacaccttcggtcagggaaccaagctcgaaatcaagcaccatcaccatcatcatcaccac

SEQ ID NO: 69 - DNA, 828 bp, Artificial Sequence
  Description of Artificial Sequence: Synthetic polynucleotide
atggccctcccagtgaccgctctgctgctgcctctcgcacttcttctccatgccgctcggcctgagatcgtcatgacccaaagccccgctaccctgtccctgtcacccggcgagagggcaaccctttcatgcagggccagccaggacatttctaagtacctcaactggtatcagcagaagccagggcaggctcctcgcctgctgatctaccacaccagccgcctccacagcggtatccccgccagattttccgggagcgggtctggaaccgactacaccctcaccatctcttctctgcagcccgaggatttcgccgtctatttctgccagcaggggaatactctgccgtacaccttcggtcaaggtaccaagctggaaatcaagggaggcggaggatcaggcggtggcggaagcggaggaggtggctccggaggaggaggttcccaagtgcagcttcaagaatcaggacccggacttgtgaagccatcagaaaccctctccctgacttgtaccgtgtccggtgtgagcctccccgactacggagtctcttggattcgccagcctccggggaagggtcttgaatggattggggtgatttggggatcagagactacttactacaattcatcacttaagtcacgggtcaccatcagcaaagataatagcaagaaccaagtgtcacttaagctgtcatctgtgaccgccgctgacaccgccgtgtactattgtgccaaacattactattacggagggtcttatgctatggactactggggacaggggaccctggtgactgtctctagccatcaccatcaccaccatcatcac

SEQ ID NO: 70 - DNA, 828 bp, Artificial Sequence
  Description of Artificial Sequence: Synthetic polynucleotide
atggcactgcctgtcactgccctcctgctgcctctggccctccttctgcatgccgccaggccccaagtccagctgcaagagtcaggacccggactggtgaagccgtctgagactctctcactgacttgtaccgtcagcggcgtgtccctccccgactacggagtgtcatggatccgccaacctcccgggaaagggcttgaatggattggtgtcatctggggttctgaaaccacctactacaactcttccctgaagtccagggtgaccatcagcaaggataattccaagaaccaggtcagccttaagctgtcatctgtgaccgctgctgacaccgccgtgtattactgcgccaagcactactattacggaggaagctacgctatggactattggggacagggcactctcgtgactgtgagcagcggcggtggagggtctggaggtggaggatccggtggtggtgggtcaggcggaggagggagcgagattgtgatgactcagtcaccagccaccctttctctttcacccggcgagagagcaaccctgagctgtagagccagccaggacatttctaagtacctcaactggtatcagcaaaaaccggggcaggcccctcgcctcctgatctaccatacctcacgccttcactctggtatccccgctcggtttagcggatcaggatctggtaccgactacactctgaccatttccagcctgcagccagaagatttcgcagtgtatttctgccagcagggcaatacccttccttacaccttcggtcagggaaccaagctcgaaatcaagcaccatcaccatcatcaccaccat

SEQ ID NO: 71 - DNA, 813 bp, Artificial Sequence
  Description of Artificial Sequence: Synthetic polynucleotide
atggccctccctgtcaccgccctgctgcttccgctggctcttctgctccacgccgctcggcccgaaattgtgatgacccagtcacccgccactcttagcctttcacccggtgagcgcgcaaccctgtcttgcagagcctcccaagacatctcaaaataccttaattggtatcaacagaagcccggacaggctcctcgccttctgatctaccacaccagccggctccattctggaatccctgccaggttcagcggtagcggatctgggaccgactacaccctcactatcagctcactgcagccagaggacttcgctgtctatttctgtcagcaagggaacaccctgccctacacctttggacagggcaccaagctcgagattaaaggtggaggtggcagcggaggaggtgggtccggcggtggaggaagccaggtccaactccaagaaagcggaccgggtcttgtgaagccatcagaaactctttcactgacttgtactgtgagcggagtgtctctccccgattacggggtgtcttggatcagacagccaccggggaagggtctggaatggattggagtgatttggggctctgagactacttactacaattcatccctcaagtcacgcgtcaccatctcaaaggacaactctaagaatcaggtgtcactgaaactgtcatctgtgaccgcagccgacaccgccgtgtactattgcgctaagcattactattatggcgggagctacgcaatggattactggggacagggtactctggtcaccgtgtccagccaccaccatcatcaccatcaccat

SEQ ID NO: 72 - DNA, 813 bp, Artificial Sequence
  Description of Artificial Sequence: Synthetic polynucleotide
atggctctgcccgtgaccgcactcctcctgccactggctctgctgcttcacgccgctcgcccacaagtccagcttcaagaatcagggcctggtctggtgaagccatctgagactctgtccctcacttgcaccgtgagcggagtgtccctcccagactacggagtgagctggattagacagcctcccggaaagggactggagtggatcggagtgatttggggtagcgaaaccacttactataactcttccctgaagtcacgggtcaccatttcaaaggataactcaaagaatcaagtgagcctcaagctctcatcagtcaccgccgctgacaccgccgtgtattactgtgccaagcattactactatggagggtcctacgccatggactactggggccagggaactctggtcactgtgtcatctggtggaggaggtagcggaggaggcgggagcggtggaggtggctccgaaatcgtgatgacccagagccctgcaaccctgtccctttctcccggggaacgggctaccctttcttgtcgggcatcacaagatatctcaaaatacctcaattggtatcaacagaagccgggacaggcccctaggcttcttatctaccacacctctcgcctgcatagcgggattcccgcacgctttagcgggtctggaagcgggaccgactacactctgaccatctcatctctccagcccgaggacttcgccgtctacttctgccagcagggtaacaccctgccgtacaccttcggccagggcaccaagcttgagatcaaacatcaccaccatcatcaccatcac

SEQ ID NO: 73 - protein, 271 aa, Artificial Sequence
  Description of Artificial Sequence: Synthetic polypeptide
MALPVTALLLPLALLLHAARPEIVMTQSPATLSLSPGERATLSCRASQDISKYLNWYQQKPGQAPRLLIYHTSRLHSGIPARFSGSGSGTDYTLTISSLQPEDFAVYFCQQGNTLPYTFGQGTKLEIKGGGGSGGGGSGGGGSQVQLQESGPGLVKPSETLSLTCTVSGVSLPDYGVSWIRQPPGKGLEWIGVIWGSETTYYSSSLKSRVTISKDNSKNQVSLKLSSVTAADTAVYYCAKHYYYGGSYAMDYWGQGTLVTVSSHHHHHHHH

SEQ ID NO: 74 - protein, 271 aa, Artificial Sequence
  Description of Artificial Sequence: Synthetic polypeptide
MALPVTALLLPLALLLHAARPEIVMTQSPATLSLSPGERATLSCRASQDISKYLNWYQQKPGQAPRLLIYHTSRLHSGIPARFSGSGSGTDYTLTISSLQPEDFAVYFCQQGNTLPYTFGQGTKLEIKGGGGSGGGGSGGGGSQVQLQESGPGLVKPSETLSLTCTVSGVSLPDYGVSWIRQPPGKGLEWIGVIWGSETTYYQSSLKSRVTISKDNSKNQVSLKLSSVTAADTAVYYCAKHYYYGGSYAMDYWGQGTLVTVSSHHHHHHHH

SEQ ID NO: 75 - protein, 271 aa, Artificial Sequence
  Description of Artificial Sequence: Synthetic polypeptide
MALPVTALLLPLALLLHAARPQVQLQESGPGLVKPSETLSLTCTVSGVSLPDYGVSWIRQPPGKGLEWIGVIWGSETTYYSSSLKSRVTISKDNSKNQVSLKLSSVTAADTAVYYCAKHYYYGGSYAMDYWGQGTLVTVSSGGGGSGGGGSGGGGSEIVMTQSPATLSLSPGERATLSCRASQDISKYLNWYQQKPGQAPRLLIYHTSRLHSGIPARFSGSGSGTDYTLTISSLQPEDFAVYFCQQGNTLPYTFGQGTKLEIKHHHHHHHH

SEQ ID NO: 76 - protein, 271 aa, Artificial Sequence
  Description of Artificial Sequence: Synthetic polypeptide
MALPVTALLLPLALLLHAARPQVQLQESGPGLVKPSETLSLTCTVSGVSLPDYGVSWIRQPPGKGLEWIGVIWGSETTYYQSSLKSRVTISKDNSKNQVSLKLSSVTAADTAVYYCAKHYYYGGSYAMDYWGQGTLVTVSSGGGGSGGGGSGGGGSEIVMTQSPATLSLSPGERATLSCRASQDISKYLNWYQQKPGQAPRLLIYHTSRLHSGIPARFSGSGSGTDYTLTISSLQPEDFAVYFCQQGNTLPYTFGQGTKLEIKHHHHHHHH

SEQ ID NO: 77 - protein, 276 aa, Artificial Sequence
  Description of Artificial Sequence: Synthetic polypeptide
MALPVTALLLPLALLLHAARPEIVMTQSPATLSLSPGERATLSCRASQDISKYLNWYQQKPGQAPRLLIYHTSRLHSGIPARFSGSGSGTDYTLTISSLQPEDFAVYFCQQGNTLPYTFGQGTKLEIKGGGGSGGGGSGGGGSGGGGSQVQLQESGPGLVKPSETLSLTCTVSGVSLPDYGVSWIRQPPGKGLEWIGVIWGSETTYYSSSLKSRVTISKDNSKNQVSLKLSSVTAADTAVYYCAKHYYYGGSYAMDYWGQGTLVTVSSHHHHHHHH

SEQ ID NO: 78 - protein, 276 aa, Artificial Sequence
  Description of Artificial Sequence: Synthetic polypeptide
MALPVTALLLPLALLLHAARPEIVMTQSPATLSLSPGERATLSCRASQDISKYLNWYQQKPGQAPRLLIYHTSRLHSGIPARFSGSGSGTDYTLTISSLQPEDFAVYFCQQGNTLPYTFGQGTKLEIKGGGGSGGGGSGGGGSGGGGSQVQLQESGPGLVKPSETLSLTCTVSGVSLPDYGVSWIRQPPGKGLEWIGVIWGSETTYYQSSLKSRVTISKDNSKNQVSLKLSSVTAADTAVYYCAKHYYYGGSYAMDYWGQGTLVTVSSHHHHHHHH

SEQ ID NO: 79 - protein, 276 aa, Artificial Sequence
  Description of Artificial Sequence: Synthetic polypeptide
MALPVTALLLPLALLLHAARPQVQLQESGPGLVKPSETLSLTCTVSGVSLPDYGVSWIRQPPGKGLEWIGVIWGSETTYYSSSLKSRVTISKDNSKNQVSLKLSSVTAADTAVYYCAKHYYYGGSYAMDYWGQGTLVTVSSGGGGSGGGGSGGGGSGGGGSEIVMTQSPATLSLSPGERATLSCRASQDISKYLNWYQQKPGQAPRLLIYHTSRLHSGIPARFSGSGSGTDYTLTISSLQPEDFAVYFCQQGNTLPYTFGQGTKLEIKHHHHHHHH

SEQ ID NO: 80 - protein, 276 aa, Artificial Sequence
  Description of Artificial Sequence: Synthetic polypeptide
MALPVTALLLPLALLLHAARPQVQLQESGPGLVKPSETLSLTCTVSGVSLPDYGVSWIRQPPGKGLEWIGVIWGSETTYYQSSLKSRVTISKDNSKNQVSLKLSSVTAADTAVYYCAKHYYYGGSYAMDYWGQGTLVTVSSGGGGSGGGGSGGGGSGGGGSEIVMTQSPATLSLSPGERATLSCRASQDISKYLNWYQQKPGQAPRLLIYHTSRLHSGIPARFSGSGSGTDYTLTISSLQPEDFAVYFCQQGNTLPYTFGQGTKLEIKHHHHHHHH

SEQ ID NO: 81 - protein, 276 aa, Artificial Sequence
  Description of Artificial Sequence: Synthetic polypeptide
MALPVTALLLPLALLLHAARPEIVMTQSPATLSLSPGERATLSCRASQDISKYLNWYQQKPGQAPRLLIYHTSRLHSGIPARFSGSGSGTDYTLTISSLQPEDFAVYFCQQGNTLPYTFGQGTKLEIKGGGGSGGGGSGGGGSGGGGSQVQLQESGPGLVKPSETLSLTCTVSGVSLPDYGVSWIRQPPGKGLEWIGVIWGSETTYYNSSLKSRVTISKDNSKNQVSLKLSSVTAADTAVYYCAKHYYYGGSYAMDYWGQGTLVTVSSHHHHHHHH

SEQ ID NO: 82 - protein, 276 aa, Artificial Sequence
  Description of Artificial Sequence: Synthetic polypeptide
MALPVTALLLPLALLLHAARPQVQLQESGPGLVKPSETLSLTCTVSGVSLPDYGVSWIRQPPGKGLEWIGVIWGSETTYYNSSLKSRVTISKDNSKNQVSLKLSSVTAADTAVYYCAKHYYYGGSYAMDYWGQGTLVTVSSGGGGSGGGGSGGGGSGGGGSEIVMTQSPATLSLSPGERATLSCRASQDISKYLNWYQQKPGQAPRLLIYHTSRLHSGIPARFSGSGSGTDYTLTISSLQPEDFAVYFCQQGNTLPYTFGQGTKLEIKHHHHHHHH

SEQ ID NO: 83 - protein, 271 aa, Artificial Sequence
  Description of Artificial Sequence: Synthetic polypeptide
MALPVTALLLPLALLLHAARPEIVMTQSPATLSLSPGERATLSCRASQDISKYLNWYQQKPGQAPRLLIYHTSRLHSGIPARFSGSGSGTDYTLTISSLQPEDFAVYFCQQGNTLPYTFGQGTKLEIKGGGGSGGGGSGGGGSQVQLQESGPGLVKPSETLSLTCTVSGVSLPDYGVSWIRQPPGKGLEWIGVIWGSETTYYNSSLKSRVTISKDNSKNQVSLKLSSVTAADTAVYYCAKHYYYGGSYAMDYWGQGTLVTVSSHHHHHHHH

SEQ ID NO: 84 - protein, 271 aa, Artificial Sequence
  Description of Artificial Sequence: Synthetic polypeptide
MALPVTALLLPLALLLHAARPQVQLQESGPGLVKPSETLSLTCTVSGVSLPDYGVSWIRQPPGKGLEWIGVIWGSETTYYNSSLKSRVTISKDNSKNQVSLKLSSVTAADTAVYYCAKHYYYGGSYAMDYWGQGTLVTVSSGGGGSGGGGSGGGGSEIVMTQSPATLSLSPGERATLSCRASQDISKYLNWYQQKPGQAPRLLIYHTSRLHSGIPARFSGSGSGTDYTLTISSLQPEDFAVYFCQQGNTLPYTFGQGTKLEIKHHHHHHHH

SEQ ID NO: 85 - DNA, 1458 bp, Artificial Sequence
  Description of Artificial Sequence: Synthetic polynucleotide
atggccctccctgtcaccgccctgctgcttccgctggctcttctgctccacgccgctcggcccgaaattgtgatgacccagtcacccgccactcttagcctttcacccggtgagcgcgcaaccctgtcttgcagagcctcccaagacatctcaaaataccttaattggtatcaacagaagcccggacaggctcctcgccttctgatctaccacaccagccggctccattctggaatccctgccaggttcagcggtagcggatctgggaccgactacaccctcactatcagctcactgcagccagaggacttcgctgtctatttctgtcagcaagggaacaccctgccctacacctttggacagggcaccaagctcgagattaaaggtggaggtggcagcggaggaggtgggtccggcggtggaggaagccaggtccaactccaagaaagcggaccgggtcttgtgaagccatcagaaactctttcactgacttgtactgtgagcggagtgtctctccccgattacggggtgtcttggatcagacagccaccggggaagggtctggaatggattggagtgatttggggctctgagactacttactactcttcatccctcaagtcacgcgtcaccatctcaaaggacaactctaagaatcaggtgtcactgaaactgtcatctgtgaccgcagccgacaccgccgtgtactattgcgctaagcattactattatggcgggagctacgcaatggattactggggacagggtactctggtcaccgtgtccagcaccactaccccagcaccgaggccacccaccccggctcctaccatcgcctcccagcctctgtccctgcgtccggaggcatgtagacccgcagctggtggggccgtgcatacccggggtcttgacttcgcctgcgatatctacatttgggcccctctggctggtacttgcggggtcctgctgctttcactcgtgatcactctttactgtaagcgcggtcggaagaagctgctgtacatctttaagcaacccttcatgaggcctgtgcagactactcaagaggaggacggctgttcatgccggttcccagaggaggaggaaggcggctgcgaactgcgcgtgaaattcagccgcagcgcagatgctccagcctacaagcaggggcagaaccagctctacaacgaactcaatcttggtcggagagaggagtacgacgtgctggacaagcggagaggacgggacccagaaatgggcgggaagccgcgcagaaagaatccccaagagggcctgtacaacgagctccaaaaggataagatggcagaagcctatagcgagattggtatgaaaggggaacgcagaagaggcaaaggccacgacggactgtaccagggactcagcaccgccaccaaggacacctatgacgctcttcacatgcaggccctgccgcctcgg

SEQ ID NO: 86 - DNA, 1458 bp, Artificial Sequence
  Description of Artificial Sequence: Synthetic polynucleotide
atggccctccctgtcaccgccctgctgcttccgctggctcttctgctccacgccgctcggcccgaaattgtgatgacccagtcacccgccactcttagcctttcacccggtgagcgcgcaaccctgtcttgcagagcctcccaagacatctcaaaataccttaattggtatcaacagaagcccggacaggctcctcgccttctgatctaccacaccagccggctccattctggaatccctgccaggttcagcggtagcggatctgggaccgactacaccctcactatcagctcactgcagccagaggacttcgctgtctatttctgtcagcaagggaacaccctgccctacacctttggacagggcaccaagctcgagattaaaggtggaggtggcagcggaggaggtgggtccggcggtggaggaagccaggtccaactccaagaaagcggaccgggtcttgtgaagccatcagaaactctttcactgacttgtactgtgagcggagtgtctctccccgattacggggtgtcttggatcagacagccaccggggaagggtctggaatggattggagtgatttggggctctgagactacttactaccaatcatccctcaagtcacgcgtcaccatctcaaaggacaactctaagaatcaggtgtcactgaaactgtcatctgtgaccgcagccgacaccgccgtgtactattgcgctaagcattactattatggcgggagctacgcaatggattactggggacagggtactctggtcaccgtgtccagcaccactaccccagcaccgaggccacccaccccggctcctaccatcgcctcccagcctctgtccctgcgtccggaggcatgtagacccgcagctggtggggccgtgcatacccggggtcttgacttcgcctgcgatatctacatttgggcccctctggctggtacttgcggggtcctgctgctttcactcgtgatcactctttactgtaagcgcggtcggaagaagctgctgtacatctttaagcaacccttcatgaggcctgtgcagactactcaagaggaggacggctgttcatgccggttcccagaggaggaggaaggcggctgcgaactgcgcgtgaaattcagccgcagcgcagatgctccagcctacaagcaggggcagaaccagctctacaacgaactcaatcttggtcggagagaggagtacgacgtgctggacaagcggagaggacgggacccagaaatgggcgggaagccgcgcagaaagaatccccaagagggcctgtacaacgagctccaaaaggataagatggcagaagcctatagcgagattggtatgaaaggggaacgcagaagaggcaaaggccacgacggactgtaccagggactcagcaccgccaccaaggacacctatgacgctcttcacatgcaggccctgccgcctcgg

SEQ ID NO: 87 - DNA, 1458 bp, Artificial Sequence
  Description of Artificial Sequence: Synthetic polynucleotide
atggctctgcccgtgaccgcactcctcctgccactggctctgctgcttcacgccgctcgcccacaagtccagcttcaagaatcagggcctggtctggtgaagccatctgagactctgtccctcacttgcaccgtgagcggagtgtccctcccagactacggagtgagctggattagacagcctcccggaaagggactggagtggatcggagtgatttggggtagcgaaaccacttactattcatcttccctgaagtcacgggtcaccatttcaaaggataactcaaagaatcaagtgagcctcaagctctcatcagtcaccgccgctgacaccgccgtgtattactgtgccaagcattactactatggagggtcctacgccatggactactggggccagggaactctggtcactgtgtcatctggtggaggaggtagcggaggaggcgggagcggtggaggtggctccgaaatcgtgatgacccagagccctgcaaccctgtccctttctcccggggaacgggctaccctttcttgtcgggcatcacaagatatctcaaaatacctcaattggtatcaacagaagccgggacaggcccctaggcttcttatctaccacacctctcgcctgcatagcgggattcccgcacgctttagcgggtctggaagcgggaccgactacactctgaccatctcatctctccagcccgaggacttcgccgtctacttctgccagcagggtaacaccctgccgtacaccttcggccagggcaccaagcttgagatcaaaaccactactcccgctccaaggccacccacccctgccccgaccatcgcctctcagccgctttccctgcgtccggaggcatgtagacccgcagctggtggggccgtgcatacccggggtcttgacttcgcctgcgatatctacatttgggcccctctggctggtacttgcggggtcctgctgctttcactcgtgatcactctttactgtaagcgcggtcggaagaagctgctgtacatctttaagcaacccttcatgaggcctgtgcagactactcaagaggaggacggctgttcatgccggttcccagaggaggaggaaggcggctgcgaactgcgcgtgaaattcagccgcagcgcagatgctccagcctacaagcaggggcagaaccagctctacaacgaactcaatcttggtcggagagaggagtacgacgtgctggacaagcggagaggacgggacccagaaatgggcgggaagccgcgcagaaagaatccccaagagggcctgtacaacgagctccaaaaggataagatggcagaagcctatagcgagattggtatgaaaggggaacgcagaagaggcaaaggccacgacggactgtaccagggactcagcaccgccaccaaggacacctatgacgctcttcacatgcaggccctgccgcctcgg

SEQ ID NO: 88 - DNA, 1458 bp, Artificial Sequence
  Description of Artificial Sequence: Synthetic polynucleotide
atggctctgcccgtgaccgcactcctcctgccactggctctgctgcttcacgccgctcgcccacaagtccagcttcaagaatcagggcctggtctggtgaagccatctgagactctgtccctcacttgcaccgtgagcggagtgtccctcccagactacggagtgagctggattagacagcctcccggaaagggactggagtggatcggagtgatttggggtagcgaaaccacttactatcaatcttccctgaagtcacgggtcaccatttcaaaggataactcaaagaatcaagtgagcctcaagctctcatcagtcaccgccgctgacaccgccgtgtattactgtgccaagcattactactatggagggtcctacgccatggactactggggccagggaactctggtcactgtgtcatctggtggaggaggtagcggaggaggcgggagcggtggaggtggctccgaaatcgtgatgacccagagccctgcaaccctgtccctttctcccggggaacgggctaccctttcttgtcgggcatcacaagatatctcaaaatacctcaattggtatcaacagaagccgggacaggcccctaggcttcttatctaccacacctctcgcctgcatagcgggattcccgcacgctttagcgggtctggaagcgggaccgactacactctgaccatctcatctctccagcccgaggacttcgccgtctacttctgccagcagggtaacaccctgccgtacaccttcggccagggcaccaagcttgagatcaaaaccactactcccgctccaaggccacccacccctgccccgaccatcgcctctcagccgctttccctgcgtccggaggcatgtagacccgcagctggtggggccgtgcatacccggggtcttgacttcgcctgcgatatctacatttgggcccctctggctggtacttgcggggtcctgctgctttcactcgtgatcactctttactgtaagcgcggtcggaagaagctgctgtacatctttaagcaacccttcatgaggcctgtgcagactactcaagaggaggacggctgttcatgccggttcccagaggaggaggaaggcggctgcgaactgcgcgtgaaattcagccgcagcgcagatgctccagcctacaagcaggggcagaaccagctctacaacgaactcaatcttggtcggagagaggagtacgacgtgctggacaagcggagaggacgggacccagaaatgggcgggaagccgcgcagaaagaatccccaagagggcctgtacaacgagctccaaaaggataagatggcagaagcctatagcgagattggtatgaaaggggaacgcagaagaggcaaaggccacgacggactgtaccagggactcagcaccgccaccaaggacacctatgacgctcttcacatgcaggccctgccgcctcgg

SEQ ID NO: 89 - DNA, 1473 bp, Artificial Sequence
  Description of Artificial Sequence: Synthetic polynucleotide
atggccctccctgtcaccgccctgctgcttccgctggctcttctgctccacgccgctcggcccgaaattgtgatgacccagtcacccgccactcttagcctttcacccggtgagcgcgcaaccctgtcttgcagagcctcccaagacatctcaaaataccttaattggtatcaacagaagcccggacaggctcctcgccttctgatctaccacaccagccggctccattctggaatccctgccaggttcagcggtagcggatctgggaccgactacaccctcactatcagctcactgcagccagaggacttcgctgtctatttctgtcagcaagggaacaccctgccctacacctttggacagggcaccaagctcgagattaaaggtggaggtggcagcggaggaggtgggtccggcggtggaggaagcggcggaggcgggagccaggtccaactccaagaaagcggaccgggtcttgtgaagccatcagaaactctttcactgacttgtactgtgagcggagtgtctctccccgattacggggtgtcttggatcagacagccaccggggaagggtctggaatggattggagtgatttggggctctgagactacttactactcttcatccctcaagtcacgcgtcaccatctcaaaggacaactctaagaatcaggtgtcactgaaactgtcatctgtgaccgcagccgacaccgccgtgtactattgcgctaagcattactattatggcgggagctacgcaatggattactggggacagggtactctggtcaccgtgtccagcaccactaccccagcaccgaggccacccaccccggctcctaccatcgcctcccagcctctgtccctgcgtccggaggcatgtagacccgcagctggtggggccgtgcatacccggggtcttgacttcgcctgcgatatctacatttgggcccctctggctggtacttgcggggtcctgctgctttcactcgtgatcactctttactgtaagcgcggtcggaagaagctgctgtacatctttaagcaacccttcatgaggcctgtgcagactactcaagaggaggacggctgttcatgccggttcccagaggaggaggaaggcggctgcgaactgcgcgtgaaattcagccgcagcgcagatgctccagcctacaagcaggggcagaaccagctctacaacgaactcaatcttggtcggagagaggagtacgacgtgctggacaagcggagaggacgggacccagaaatgggcgggaagccgcgcagaaagaatccccaagagggcctgtacaacgagctccaaaaggataagatggcagaagcctatagcgagattggtatgaaaggggaacgcagaagaggcaaaggccacgacggactgtaccagggactcagcaccgccaccaaggacacctatgacgctcttcacatgcaggccctgccgcctcgg

SEQ ID NO: 90 - DNA, 1473 bp, Artificial Sequence
  Description of Artificial Sequence: Synthetic polynucleotide
atggccctccctgtcaccgccctgctgcttccgctggctcttctgctccacgccgctcggcccgaaattgtgatgacccagtcacccgccactcttagcctttcacccggtgagcgcgcaaccctgtcttgcagagcctcccaagacatctcaaaataccttaattggtatcaacagaagcccggacaggctcctcgccttctgatctaccacaccagccggctccattctggaatccctgccaggttcagcggtagcggatctgggaccgactacaccctcactatcagctcactgcagccagaggacttcgctgtctatttctgtcagcaagggaacaccctgccctacacctttggacagggcaccaagctcgagattaaaggtggaggtggcagcggaggaggtgggtccggcggtggaggaagcggaggcggagggagccaggtccaactccaagaaagcggaccgggtcttgtgaagccatcagaaactctttcactgacttgtactgtgagcggagtgtctctccccgattacggggtgtcttggatcagacagccaccggggaagggtctggaatggattggagtgatttggggctctgagactacttactaccaatcatccctcaagtcacgcgtcaccatctcaaaggacaactctaagaatcaggtgtcactgaaactgtcatctgtgaccgcagccgacaccgccgtgtactattgcgctaagcattactattatggcgggagctacgcaatggattactggggacagggtactctggtcaccgtgtccagcaccactaccccagcaccgaggccacccaccccggctcctaccatcgcctcccagcctctgtccctgcgtccggaggcatgtagacccgcagctggtggggccgtgcatacccggggtcttgacttcgcctgcgatatctacatttgggcccctctggctggtacttgcggggtcctgctgctttcactcgtgatcactctttactgtaagcgcggtcggaagaagctgctgtacatctttaagcaacccttcatgaggcctgtgcagactactcaagaggaggacggctgttcatgccggttcccagaggaggaggaaggcggctgcgaactgcgcgtgaaattcagccgcagcgcagatgctccagcctacaagcaggggcagaaccagctctacaacgaactcaatcttggtcggagagaggagtacgacgtgctggacaagcggagaggacgggacccagaaatgggcgggaagccgcgcagaaagaatccccaagagggcctgtacaacgagctccaaaaggataagatggcagaagcctatagcgagattggtatgaaaggggaacgcagaagaggcaaaggccacgacggactgtaccagggactcagcaccgccaccaaggacacctatgacgctcttcacatgcaggccctgccgcctcgg

SEQ ID NO: 91 - DNA, 1473 bp, Artificial Sequence
  Description of Artificial Sequence: Synthetic polynucleotide
atggctctgcccgtgaccgcactcctcctgccactggctctgctgcttcacgccgctcgcccacaagtccagcttcaagaatcagggcctggtctggtgaagccatctgagactctgtccctcacttgcaccgtgagcggagtgtccctcccagactacggagtgagctggattagacagcctcccggaaagggactggagtggatcggagtgatttggggtagcgaaaccacttactattcatcttccctgaagtcacgggtcaccatttcaaaggataactcaaagaatcaagtgagcctcaagctctcatcagtcaccgccgctgacaccgccgtgtattactgtgccaagcattactactatggagggtcctacgccatggactactggggccagggaactctggtcactgtgtcatctggtggaggaggtagcggaggaggcgggagcggtggaggtggctccggaggtggcggaagcgaaatcgtgatgacccagagccctgcaaccctgtccctttctcccggggaacgggctaccctttcttgtcgggcatcacaagatatctcaaaatacctcaattggtatcaacagaagccgggacaggcccctaggcttcttatctaccacacctctcgcctgcatagcgggattcccgcacgctttagcgggtctggaagcgggaccgactacactctgaccatctcatctctccagcccgaggacttcgccgtctacttctgccagcagggtaacaccctgccgtacaccttcggccagggcaccaagcttgagatcaaaaccactactcccgctccaaggccacccacccctgccccgaccatcgcctctcagccgctttccctgcgtccggaggcatgtagacccgcagctggtggggccgtgcatacccggggtcttgacttcgcctgcgatatctacatttgggcccctctggctggtacttgcggggtcctgctgctttcactcgtgatcactctttactgtaagcgcggtcggaagaagctgctgtacatctttaagcaacccttcatgaggcctgtgcagactactcaagaggaggacggctgttcatgccggttcccagaggaggaggaaggcggctgcgaactgcgcgtgaaattcagccgcagcgcagatgctccagcctacaagcaggggcagaaccagctctacaacgaactcaatcttggtcggagagaggagtacgacgtgctggacaagcggagaggacgggacccagaaatgggcgggaagccgcgcagaaagaatccccaagagggcctgtacaacgagctccaaaaggataagatggcagaagcctatagcgagattggtatgaaaggggaacgcagaagaggcaaaggccacgacggactgtaccagggactcagcaccgccaccaaggacacctatgacgctcttcacatgcaggccctgccgcctcgg

SEQ ID NO: 92 - DNA, 1473 bp, Artificial Sequence
  Description of Artificial Sequence: Synthetic polynucleotide
atggctctgcccgtgaccgcactcctcctgccactggctctgctgcttcacgccgctcgcccacaagtccagcttcaagaatcagggcctggtctggtgaagccatctgagactctgtccctcacttgcaccgtgagcggagtgtccctcccagactacggagtgagctggattagacagcctcccggaaagggactggagtggatcggagtgatttggggtagcgaaaccacttactatcaatcttccctgaagtcacgggtcaccatttcaaaggataactcaaagaatcaagtgagcctcaagctctcatcagtcaccgccgctgacaccgccgtgtattactgtgccaagcattactactatggagggtcctacgccatggactactggggccagggaactctggtcactgtgtcatctggtggaggaggtagcggaggaggcgggagcggtggaggtggctccggaggcggtgggtcagaaatcgtgatgacccagagccctgcaaccctgtccctttctcccggggaacgggctaccctttcttgtcgggcatcacaagatatctcaaaatacctcaattggtatcaacagaagccgggacaggcccctaggcttcttatctaccacacctctcgcctgcatagcgggattcccgcacgctttagcgggtctggaagcgggaccgactacactctgaccatctcatctctccagcccgaggacttcgccgtctacttctgccagcagggtaacaccctgccgtacaccttcggccagggcaccaagcttgagatcaaaaccactactcccgctccaaggccacccacccctgccccgaccatcgcctctcagccgctttccctgcgtccggaggcatgtagacccgcagctggtggggccgtgcatacccggggtcttgacttcgcctgcgatatctacatttgggcccctctggctggtacttgcggggtcctgctgctttcactcgtgatcactctttactgtaagcgcggtcggaagaagctgctgtacatctttaagcaacccttcatgaggcctgtgcagactactcaagaggaggacggctgttcatgccggttcccagaggaggaggaaggcggctgcgaactgcgcgtgaaattcagccgcagcgcagatgctccagcctacaagcaggggcagaaccagctctacaacgaactcaatcttggtcggagagaggagtacgacgtgctggacaagcggagaggacgggacccagaaatgggcgggaagccgcgcagaaagaatccccaagagggcctgtacaacgagctccaaaaggataagatggcagaagcctatagcgagattggtatgaaaggggaacgcagaagaggcaaaggccacgacggactgtaccagggactcagcaccgccaccaaggacacctatgacgctcttcacatgcaggccctgccgcctcgg

SEQ ID NO: 93 - DNA, 1473 bp, Artificial Sequence
  Description of Artificial Sequence: Synthetic polynucleotide
atggccctccctgtcaccgccctgctgcttccgctggctcttctgctccacgccgctcggcccgaaattgtgatgacccagtcacccgccactcttagcctttcacccggtgagcgcgcaaccctgtcttgcagagcctcccaagacatctcaaaataccttaattggtatcaacagaagcccggacaggctcctcgccttctgatctaccacaccagccggctccattctggaatccctgccaggttcagcggtagcggatctgggaccgactacaccctcactatcagctcactgcagccagaggacttcgctgtctatttctgtcagcaagggaacaccctgccctacacctttggacagggcaccaagctcgagattaaaggtggaggtggcagcggaggaggtgggtccggcggtggaggaagcggaggcggtgggagccaggtccaactccaagaaagcggaccgggtcttgtgaagccatcagaaactctttcactgacttgtactgtgagcggagtgtctctccccgattacggggtgtcttggatcagacagccaccggggaagggtctggaatggattggagtgatttggggctctgagactacttactacaactcatccctcaagtcacgcgtcaccatctcaaaggacaactctaagaatcaggtgtcactgaaactgtcatctgtgaccgcagccgacaccgccgtgtactattgcgctaagcattactattatggcgggagctacgcaatggattactggggacagggtactctggtcaccgtgtccagcaccactaccccagcaccgaggccacccaccccggctcctaccatcgcctcccagcctctgtccctgcgtccggaggcatgtagacccgcagctggtggggccgtgcatacccggggtcttgacttcgcctgcgatatctacatttgggcccctctggctggtacttgcggggtcctgctgctttcactcgtgatcactctttactgtaagcgcggtcggaagaagctgctgtacatctttaagcaacccttcatgaggcctgtgcagactactcaagaggaggacggctgttcatgccggttcccagaggaggaggaaggcggctgcgaactgcgcgtgaaattcagccgcagcgcagatgctccagcctacaagcaggggcagaaccagctctacaacgaactcaatcttggtcggagagaggagtacgacgtgctggacaagcggagaggacgggacccagaaatgggcgggaagccgcgcagaaagaatccccaagagggcctgtacaacgagctccaaaaggataagatggcagaagcctatagcgagattggtatgaaaggggaacgcagaagaggcaaaggccacgacggactgtaccagggactcagcaccgccaccaaggacacctatgacgctcttcacatgcaggccctgccgcctcgg

SEQ ID NO: 94 - DNA, 1473 bp, Artificial Sequence; identical to SEQ ID NO: 93
  Description of Artificial Sequence: Synthetic polynucleotide

SEQ ID NO: 95 - DNA, 1473 bp, Artificial Sequence
  Description of Artificial Sequence: Synthetic polynucleotide
atggctctgcccgtgaccgcactcctcctgccactggctctgctgcttcacgccgctcgcccacaagtccagcttcaagaatcagggcctggtctggtgaagccatctgagactctgtccctcacttgcaccgtgagcggagtgtccctcccagactacggagtgagctggattagacagcctcccggaaagggactggagtggatcggagtgatttggggtagcgaaaccacttactataactcttccctgaagtcacgggtcaccatttcaaaggataactcaaagaatcaagtgagcctcaagctctcatcagtcaccgccgctgacaccgccgtgtattactgtgccaagcattactactatggagggtcctacgccatggactactggggccagggaactctggtcactgtgtcatctggtggaggaggtagcggaggaggcgggagcggtggaggtggctccggaggtggcggaagcgaaatcgtgatgacccagagccctgcaaccctgtccctttctcccggggaacgggctaccctttcttgtcgggcatcacaagatatctcaaaatacctcaattggtatcaacagaagccgggacaggcccctaggcttcttatctaccacacctctcgcctgcatagcgggattcccgcacgctttagcgggtctggaagcgggaccgactacactctgaccatctcatctctccagcccgaggacttcgccgtctacttctgccagcagggtaacaccctgccgtacaccttcggccagggcaccaagcttgagatcaaaaccactactcccgctccaaggccacccacccctgccccgaccatcgcctctcagccgctttccctgcgtccggaggcatgtagacccgcagctggtggggccgtgcatacccggggtcttgacttcgcctgcgatatctacatttgggcccctctggctggtacttgcggggtcctgctgctttcactcgtgatcactctttactgtaagcgcggtcggaagaagctgctgtacatctttaagcaacccttcatgaggcctgtgcagactactcaagaggaggacggctgttcatgccggttcccagaggaggaggaaggcggctgcgaactgcgcgtgaaattcagccgcagcgcagatgctccagcctacaagcaggggcagaaccagctctacaacgaactcaatcttggtcggagagaggagtacgacgtgctggacaagcggagaggacgggacccagaaatgggcgggaagccgcgcagaaagaatccccaagagggcctgtacaacgagctccaaaaggataagatggcagaagcctatagcgagattggtatgaaaggggaacgcagaagaggcaaaggccacgacggactgtaccagggactcagcaccgccaccaaggacacctatgacgctcttcacatgcaggccctgccgcctcgg

SEQ ID NO: 96 - DNA, 1458 bp, Artificial Sequence
  Description of Artificial Sequence: Synthetic polynucleotide
atggccctccctgtcaccgccctgctgcttccgctggctcttctgctccacgccgctcggcccgaaattgtgatgacccagtcacccgccactcttagcctttcacccggtgagcgcgcaaccctgtcttgcagagcctcccaagacatctcaaaataccttaattggtatcaacagaagcccggacaggctcctcgccttctgatctaccacaccagccggctccattctggaatccctgccaggttcagcggtagcggatctgggaccgactacaccctcactatcagctcactgcagccagaggacttcgctgtctatttctgtcagcaagggaacaccctgccctacacctttggacagggcaccaagctcgagattaaaggtggaggtggcagcggaggaggtgggtccggcggtggaggaagccaggtccaactccaagaaagcggaccgggtcttgtgaagccatcagaaactctttcactgacttgtactgtgagcggagtgtctctccccgattacggggtgtcttggatcagacagccaccggggaagggtctggaatggattggagtgatttggggctctgagactacttactacaactcatccctcaagtcacgcgtcaccatctcaaaggacaactctaagaatcaggtgtcactgaaactgtcatctgtgaccgcagccgacaccgccgtgtactattgcgctaagcattactattatggcgggagctacgcaatggattactggggacagggtactctggtcaccgtgtccagcaccactaccccagcaccgaggccacccaccccggctcctaccatcgcctcccagcctctgtccctgcgtccggaggcatgtagacccgcagctggtggggccgtgcatacccggggtcttgacttcgcctgcgatatctacatttgggcccctctggctggtacttgcggggtcctgctgctttcactcgtgatcactctttactgtaagcgcggtcggaagaagctgctgtacatctttaagcaacccttcatgaggcctgtgcagactactcaagaggaggacggctgttcatgccggttcccagaggaggaggaaggcggctgcgaactgcgcgtgaaattcagccgcagcgcagatgctccagcctacaagcaggggcagaaccagctctacaacgaactcaatcttggtcggagagaggagtacgacgtgctggacaagcggagaggacgggacccagaaatgggcgggaagccgcgcagaaagaatccccaagagggcctgtacaacgagctccaaaaggataagatggcagaagcctatagcgagattggtatgaaaggggaacgcagaagaggcaaaggccacgacggactgtaccagggactcagcaccgccaccaaggacacctatgacgctcttcacatgcaggccctgccgcctcgg

SEQ ID NO: 97 - DNA, 813 bp, Artificial Sequence
  Description of Artificial Sequence: Synthetic polynucleotide
atggccctgcccgtcaccgctctgctgctgccccttgctctgcttcttcatgcagcaaggccggacatccagatgacccaaaccacctcatccctctctgcctctcttggagacagggtgaccatttcttgtcgcgccagccaggacatcagcaagtatctgaactggtatcagcagaagccggacggaaccgtgaagctcctgatctaccatacctctcgcctgcatagcggcgtgccctcacgcttctctggaagcggatcaggaaccgattattctctcactatttcaaatcttgagcaggaagatattgccacctatttctgccagcagggtaataccctgccctacaccttcggaggagggaccaagctcgaaatcaccggtggaggaggcagcggcggtggagggtctggtggaggtggttctgaggtgaagctgcaagaatcaggccctggacttgtggccccttcacagtccctgagcgtgacttgcaccgtgtccggagtctccctgcccgactacggagtgtcatggatcagacaacctccacggaaaggactggaatggctcggtgtcatctggggtagcgaaactacttactacaattcagccctcaaaagcaggctgactattatcaaggacaacagcaagtcccaagtctttcttaagatgaactcactccagactgacgacaccgcaatctactattgtgctaagcactactactacggaggatcctacgctatggattactggggacaaggtacttccgtcactgtctcttcacaccatcatcaccatcaccatcac

SEQ ID NO: 98 - protein, 271 aa, Artificial Sequence
  Description of Artificial Sequence: Synthetic polypeptide
MALPVTALLLPLALLLHAARPDIQMTQTTSSLSASLGDRVTISCRASQDISKYLNWYQQKPDGTVKLLIYHTSRLHSGVPSRFSGSGSGTDYSLTISNLEQEDIATYFCQQGNTLPYTFGGGTKLEITGGGGSGGGGSGGGGSEVKLQESGPGLVAPSQSLSVTCTVSGVSLPDYGVSWIRQPPRKGLEWLGVIWGSETTYYNSALKSRLTIIKDNSKSQVFLKMNSLQTDDTAIYYCAKHYYYGGSYAMDYWGQGTSVTVSSHHHHHHHH

SEQ ID NO: 99 - DNA, 1458 bp, Artificial Sequence
  Description of Artificial Sequence: Synthetic polynucleotide
atggccttaccagtgaccgccttgctcctgccgctggccttgctgctccacgccgccaggccggacatccagatgacacagactacatcctccctgtctgcctctctgggagacagagtcaccatcagttgcagggcaagtcaggacattagtaaatatttaaattggtatcagcagaaaccagatggaactgttaaactcctgatctaccatacatcaagattacactcaggagtcccatcaaggttcagtggcagtgggtctggaacagattattctctcaccattagcaacctggagcaagaagatattgccacttacttttgccaacagggtaatacgcttccgtacacgttcggaggggggaccaagctggagatcacaggtggcggtggctcgggcggtggtgggtcgggtggcggcggatctgaggtgaaactgcaggagtcaggacctggcctggtggcgccctcacagagcctgtccgtcacatgcactgtctcaggggtctcattacccgactatggtgtaagctggattcgccagcctccacgaaagggtctggagtggctgggagtaatatggggtagtgaaaccacatactataattcagctctcaaatccagactgaccatcatcaaggacaactccaagagccaagttttcttaaaaatgaacagtctgcaaactgatgacacagccatttactactgtgccaaacattattactacggtggtagctatgctatggactactggggccaaggaacctcagtcaccgtctcctcaaccacgacgccagcgccgcgaccaccaacaccggcgcccaccatcgcgtcgcagcccctgtccctgcgcccagaggcgtgccggccagcggcggggggcgcagtgcacacgagggggctggacttcgcctgtgatatctacatctgggcgcccttggccgggacttgtggggtccttctcctgtcactggttatcaccctttactgcaaacggggcagaaagaaactcctgtatatattcaaacaaccatttatgagaccagtacaaactactcaagaggaagatggctgtagctgccgatttccagaagaagaagaaggaggatgtgaactgagagtgaagttcagcaggagcgcagacgcccccgcgtacaagcagggccagaaccagctctataacgagctcaatctaggacgaagagaggagtacgatgttttggacaagagacgtggccgggaccctgagatggggggaaagccgagaaggaagaaccctcaggaaggcctgtacaatgaactgcagaaagataagatggcggaggcctacagtgagattgggatgaaaggcgagcgccggaggggcaaggggcacgatggcctttaccagggtctcagtacagccaccaaggacacctacgacgcccttcacatgcaggccctgccccctcgc

SEQ ID NO: 100 - DNA, 1184 bp, Artificial Sequence
  Description of Artificial Sequence: Synthetic polynucleotide
cgtgaggctccggtgcccgtcagtgggcagagcgcacatcgcccacagtccccgagaagttggggggaggggtcggcaattgaaccggtgcctagagaaggtggcgcggggtaaactgggaaagtgatgtcgtgtactggctccgcctttttcccgagggtgggggagaaccgtatataagtgcagtagtcgccgtgaacgttctttttcgcaacgggtttgccgccagaacacaggtaagtgccgtgtgtggttcccgcgggcctggcctctttacgggttatggcccttgcgtgccttgaattacttccacctggctgcagtacgtgattcttgatcccgagcttcgggttggaagtgggtgggagagttcgaggccttgcgcttaaggagccccttcgcctcgtgcttgagttgaggcctggcctgggcgctggggccgccgcgtgcgaatctggtggcaccttcgcgcctgtctcgctgctttcgataagtctctagccatttaaaatttttgatgacctgctgcgacgctttttttctggcaagatagtcttgtaaatgcgggccaagatctgcacactggtatttcggtttttggggccgcgggcggcgacggggcccgtgcgtcccagcgcacatgttcggcgaggcggggcctgcgagcgcggccaccgagaatcggacgggggtagtctcaagctggccggcctgctctggtgcctggcctcgcgccgccgtgtatcgccccgccctgggcggcaaggctggcccggtcggcaccagttgcgtgagcggaaagatggccgcttcccggccctgctgcagggagctcaaaatggaggacgcggcgctcgggagagcgggcgggtgagtcacccacacaaaggaaaagggcctttccgtcctcagccgtcgcttcatgtgactccacggagtaccgggcgccgtccaggcacctcgattagttctcgagcttttggagtacgtcgtctttaggttggggggaggggttttatgcgatggagtttccccacactgagtgggtggagactgaagttaggccagcttggcacttgatgtaattctccttggaatttgccctttttgagtttggatcttggttcattctcaagcctcagacagtggttcaaagtttttttcttccatttcaggtgtcgtga

SEQ ID NO: 101 - DNA, 336 bp, Artificial Sequence
  Description of Artificial Sequence: Synthetic polynucleotide
agagtgaagttcagcaggagcgcagacgcccccgcgtacaagcagggccagaaccagctctataacgagctcaatctaggacgaagagaggagtacgatgttttggacaagagacgtggccgggaccctgagatggggggaaagccgagaaggaagaaccctcaggaaggcctgtacaatgaactgcagaaagataagatggcggaggcctacagtgagattgggatgaaaggcgagcgccggaggggcaaggggcacgatggcctttaccagggtctcagtacagccaccaaggacacctacgacgcccttcacatgcaggccctgccccctcgc

SEQ ID NO: 102 - protein, 230 aa, Artificial Sequence; identical to SEQ ID NO: 45
  Description of Artificial Sequence: Synthetic polypeptide

SEQ ID NO: 103 - DNA, 690 bp, Artificial Sequence; identical to SEQ ID NO: 46
  Description of Artificial Sequence: Synthetic polynucleotide

SEQ ID NO: 104 - skipped

SEQ ID NO: 105 - protein, 40 aa, Artificial Sequence
  Description of Artificial Sequence: Synthetic polypeptide
  MISC_FEATURE (1)..(40): This sequence may encompass 1-10 "Gly Gly Gly Ser" repeating units
  See specification as filed for detailed description of substitutions and preferred embodiments
GGGSGGGSGGGSGGGSGGGSGGGSGGGSGGGSGGGSGGGS

SEQ ID NO: 106 - protein, 20 aa, Artificial Sequence
  Description of Artificial Sequence: Synthetic peptide
GGGGSGGGGSGGGGSGGGGS

SEQ ID NO: 107 - protein, 15 aa, Artificial Sequence
  Description of Artificial Sequence: Synthetic peptide
GGGGSGGGGSGGGGS

SEQ ID NO: 108 - protein, 4 aa, Artificial Sequence
  Description of Artificial Sequence: Synthetic peptide
GGGS

SEQ ID NO: 109 - protein, 244 aa, Artificial Sequence
  Description of Artificial Sequence: Synthetic polypeptide
QVQLLESGAELVRPGSSVKISCKASGYAFSSYWMNWVKQRPGQGLEWIGQIYPGDGDTNYNGKFKGQATLTADKSSSTAYMQLSGLTSEDSAVYSCARKTISSVVDFYFDYWGQGTTVTGGGSGGGSGGGSGGGSELVLTQSPKFMSTSVGDRVSVTCKASQNVGTNVAWYQQKPGQSPKPLIYSATYRNSGVPDRFTGSGSGTDFTLTITNVQSKDLADYFCQYNRYPYTSFFFTKLEIKRRS

SEQ ID NO: 110 - protein, 464 aa, Artificial Sequence
  Description of Artificial Sequence: Synthetic polypeptide
QVQLLESGAELVRPGSSVKISCKASGYAFSSYWMNWVKQRPGQGLEWIGQIYPGDGDTNYNGKFKGQATLTADKSSSTAYMQLSGLTSEDSAVYSCARKTISSVVDFYFDYWGQGTTVTGGGSGGGSGGGSGGGSELVLTQSPKFMSTSVGDRVSVTCKASQNVGTNVAWYQQKPGQSPKPLIYSATYRNSGVPDRFTGSGSGTDFTLTITNVQSKDLADYFCQYNRYPYTSFFFTKLEIKRRSKIEVMYPPPYLDNEKSNGTIIHVKGKHLCPSPLFPGPSKPFWVLVVVGGVLACYSLLVTVAFIIFWVRSKRSRLLHSDYMNMTPRRPGPTRKHYQPYAPPRDFAAYRSRVKFSRSADAPAYQQGQNQLYNELNLGRREEYDVLDKRRGRDPEMGGKPRRKNPQEGLYNELQKDKMAEAYSEIGMKGERRRGKGHDGLYQGLSTATKDTYDALHMQALPPR

SEQ ID NO: 111 - protein, 246 aa, Artificial Sequence
  Description of Artificial Sequence: Synthetic polypeptide
DIQMTQTTSSLSASLGDRVTISCRASQDISKYLNWYQQKPDGTVKLLIYHTSRLHSGVPSRFSGSGSGTDYSLTISNLEQEDIATYFCQQGNTLPYTFGGGTKLEITGSTSGSGKPGSGEGSTKGEVKLQESGPGLVAPSQSLSVTCTVSGVSLPDYGVSWIRQPPRKGLEWLGVIWGSETTYYNSALKSRLTIIKDNSKSQVFLKMNSLQTDDTAIYYCAKHYYYGGSYAMDYWGQGTSVTVSSE

SEQ ID NO: 112 - protein, 439 aa, Artificial Sequence
  Description of Artificial Sequence: Synthetic polypeptide
DIQMTQTTSSLSASLGDRVTISCRASQDISKYLNWYQQKPDGTVKLLIYHTSRLHSGVPSRFSGSGSGTDYSLTISNLEQEDIATYFCQQGNTLPYTFGGGTKLEITGSTSGSGKPGSGEGSTKGEVKLQESGPGLVAPSQSLSVTCTVSGVSLPDYGVSWIRQPPRKGLEWLGVIWGSETTYYNSALKSRLTIIKDNSKSQVFLKMNSLQTDDTAIYYCAKHYYYGGSYAMDYWGQGTSVTVSSESKYGPPCPPCPMFWVLVVVGGVLACYSLLVTVAFIIFWVKRGRKKLLYIFKQPFMRPVQTTQEEDGCSCRFEEEEGGCELRVKFSRSADAPAYQQGQNQLYNELNLGRREEYDVLDKRRGRDPEMGGKPRRKNPQEGLYNELQKDKMAEAYSEIGMKGERRRGKGHDGLYQGLSTATKDTYDALHMQALPPRL

SEQ ID NO: 113 - protein, 819 aa, Artificial Sequence
  Description of Artificial Sequence: Synthetic polypeptide
DIQMTQTTSSLSASLGDRVTISCRASQDISKYLNWYQQKPDGTVKLLIYHTSRLHSGVPSRFSGSGSGTDYSLTISNLEQEDIATYFCQQGNTLPYTFGGGTKLEITGSTSGSGKPGSGEGSTKGEVKLQESGPGLVAPSQSLSVTCTVSGVSLPDYGVSWIRQPPRKGLEWLGVIWGSETTYYNSALKSRLTIIKDNSKSQVFLKMNSLQTDDTAIYYCAKHYYYGGSYAMDYWGQGTSVTVSSESKYGPPCPPCPMFWVLVVVGGVLACYSLLVTVAFIIFWVKRGRKKLLYIFKQPFMRPVQTTQEEDGCSCRFEEEEGGCELRVKFSRSADAPAYQQGQNQLYNELNLGRREEYDVLDKRRGRDPEMGGKPRRKNPQEGLYNELQKDKMAEAYSEIGMKGERRRGKGHDGLYQGLSTATKDTYDALHMQALPPRLEGGGEGRGSLLTCGDVEENPGPRMLLLVTSLLLCELPHPAFLLIPRKVCNGIGIGEFKDSLSINATNIKHFKNCTSISGDLHILPVAFRGDSFTHTPPLDPQELDILKTVKEITGFLLIQAWPENRTDLHAFENLEIIRGRTKQHGQFSLAVVSLNITSLGLRSLKEISDGDVIISGNKNLCYANTINWKKLFGTSGQKTKIISNRGENSCKATGQVCHALCSPEGCWGPEPRDCVSCRNVSRGRECVDKCNLLEGEPREFVENSECIQCHPECLPQAMNITCTGRGPDNCIQCAHYIDGPHCVKTCPAGVMGENNTLVWKYADAGHVCHLCHPNCTYGCTGPGLEGCPTNGPKIPSIATGMVGALLLLLVVALGIGLFM

SEQ ID NO: 114 - protein, 245 aa, Artificial Sequence
  Description of Artificial Sequence: Synthetic polypeptide
DIQMTQTTSSLSASLGDRVTISCRASQDISKYLNWYQQKPDGTVKLLIYHTSRLHSGVPSRFSGSGSGTDYSLTISNLEQEDIATYFCQQGNTLPYTFGGGTKLEITGSTSGSGKPGSGEGSTKGEVKLQESGPGLVAPSQSLSVTCTVSGVSLPDYGVSWIRQPPRKGLEWLGVIWGSETTYYNSALKSRLTIIKDNSKSQVFLKMNSLQTDDTAIYYCAKHYYYGGSYAMDYWGQGTSVTVSS

SEQ ID NO: 115 - protein, 467 aa, Artificial Sequence
  Description of Artificial Sequence: Synthetic polypeptide
DIQMTQTTSSLSASLGDRVTISCRASQDISKYLNWYQQKPDGTVKLLIYHTSRLHSGVPSRFSGSGSGTDYSLTISNLEQEDIATYFCQQGNTLPYTFGGGTKLEITGSTSGSGKPGSGEGSTKGEVKLQESGPGLVAPSQSLSVTCTVSGVSLPDYGVSWIRQPPRKGLEWLGVIWGSETTYYNSALKSRLTIIKDNSKSQVFLKMNSLQTDDTAIYYCAKHYYYGGSYAMDYWGQGTSVTVSSAAAIEVMYPPPYLDNEKSNGTIIHVKGKHLCPSPLFPGPSKPFWVLVVVGGVLACYSLLVTVAFIIFWVRSKRSRLLHSDYMNMTPRRPGPTRKHYQPYAPPRDFAAYRSRVKFSRSADAPAYQQGQNQLYNELNLGRREEYDVLDKRRGRDPEMGGKPRRKNPQEGLYNELQKDKMAEAYSEIGMKGERRRGKGHDGLYQGLSTATKDTYDALHMQALPPR

SEQ ID NO: 116-117 - skipped (2 entries)

SEQ ID NO: 118 - RNA, 2000 nt, Artificial Sequence
  Description of Artificial Sequence: Synthetic polynucleotide
  misc_feature (1)..(2000): This sequence may encompass 50-2000 nucleotides
aaaaaaaaaaaaaaaaaaaaaaaaaaaaaaaaaaaaaaaaaaaaaaaaaaaaaaaaaaaaaaaaaaaaaaaaaaaaaaaaaaaaaaaaaaaaaaaaaaaaaaaaaaaaaaaaaaaaaaaaaaaaaaaaaaaaaaaaaaaaaaaaaaaaaaaaaaaaaaaaaaaaaaaaaaaaaaaaaaaaaaaaaaaaaaaaaaaaaaaaaaaaaaaaaaaaaaaaaaaaaaaaaaaaaaaaaaaaaaaaaaaaaaaaaaaaaaaaaaaaaaaaaaaaaaaaaaaaaaaaaaaaaaaaaaaaaaaaaaaaaaaaaaaaaaaaaaaaaaaaaaaaaaaaaaaaaaaaaaaaaaaaaaaaaaaaaaaaaaaaaaaaaaaaaaaaaaaaaaaaaaaaaaaaaaaaaaaaaaaaaaaaaaaaaaaaaaaaaaaaaaaaaaaaaaaaaaaaaaaaaaaaaaaaaaaaaaaaaaaaaaaaaaaaaaaaaaaaaaaaaaaaaaaaaaaaaaaaaaaaaaaaaaaaaaaaaaaaaaaaaaaaaaaaaaaaaaaaaaaaaaaaaaaaaaaaaaaaaaaaaaaaaaaaaaaaaaaaaaaaaaaaaaaaaaaaaaaaaaaaaaaaaaaaaaaaaaaaaaaaaaaaaaaaaaaaaaaaaaaaaaaaaaaaaaaaaaaaaaaaaaaaaaaaaaaaaaaaaaaaaaaaaaaaaaaaaaaaaaaaaaaaaaaaaaaaaaaaaaaaaaaaaaaaaaaaaaaaaaaaaaaaaaaaaaaaaaaaaaaaaaaaaaaaaaaaaaaaaaaaaaaaaaaaaaaaaaaaaaaaaaaaaaaaaaaaaaaaaaaaaaaaaaaaaaaaaaaaaaaaaaaaaaaaaaaaaaaaaaaaaaaaaaaaaaaaaaaaaaaaaaaaaaaaaaaaaaaaaaaaaaaaaaaaaaaaaaaaaaaaaaaaaaaaaaaaaaaaaaaaaaaaaaaaaaaaaaaaaaaaaaaaaaaaaaaaaaaaaaaaaaaaaaaaaaaaaaaaaaaaaaaaaaaaaaaaaaaaaaaaaaaaaaaaaaaaaaaaaaaaaaaaaaaaaaaaaaaaaaaaaaaaaaaaaaaaaaaaaaaaaaaaaaaaaaaaaaaaaaaaaaaaaaaaaaaaaaaaaaaaaaaaaaaaaaaaaaaaaaaaaaaaaaaaaaaaaaaaaaaaaaaaaaaaaaaaaaaaaaaaaaaaaaaaaaaaaaaaaaaaaaaaaaaaaaaaaaaaaaaaaaaaaaaaaaaaaaaaaaaaaaaaaaaaaaaaaaaaaaaaaaaaaaaaaaaaaaaaaaaaaaaaaaaaaaaaaaaaaaaaaaaaaaaaaaaaaaaaaaaaaaaaaaaaaaaaaaaaaaaaaaaaaaaaaaaaaaaaaaaaaaaaaaaaaaaaaaaaaaaaaaaaaaaaaaaaaaaaaaaaaaaaaaaaaaaaaaaaaaaaaaaaaaaaaaaaaaaaaaaaaaaaaaaaaaaaaaaaaaaaaaaaaaaaaaaaaaaaaaaaaaaaaaaaaaaaaaaaaaaaaaaaaaaaaaaaaaaaaaaaaaaaaaaaaaaaaaaaaaaaaaaaaaaaaaaaaaaaaaaaaaaaaaaaaaaaaaaaaaaaaaaaaaaaaaaaaaaaaaaaaaaaaaaaaaaaaaaaaaaaaaaaaaaaaaaaaaaaaaaaaaaaaaaaaaaaaaaaaaaaaaaaaaaaaaaaaaaaaaaaaaaaaaaaaaaaaaaaaaaaaaaaaaaaaaaaaaaaaaaaaaaaaaaaaaaaaaaaaaaaaaaaaaaaaaaaaaaaaaaaaaaaaaaaaaaaaaaaaaaaaaaaaaaaaaaaaaaaaaaaaaaaaaaaaaaaaaaaaaaaaaaaaaaaaaaaaaaaaaaaaaaaaaaaaaaaaaaaaaaaaaaaaaaaaaaaaaaaaaaaaaaaaaaaaaaaaaaaaaaaaaaaaaaaaaaaaaaaaaaaaaaaaaaaaaaaaaaaaaaaaaaaaaaaaaaaaaaaaaaaaaaaaaaaaaaaaaaaaaaaaaaaaaaaaaaaaaaaaaaa

SEQ ID NO: 119 - protein, 373 aa, Artificial Sequence
  Description of Artificial Sequence: Synthetic polypeptide
PGWFLDSPDRPWNPPTFSPALLVVTEGDNATFTCSFSNTSESFVLNWYRMSPSNQTDKLAAFPEDRSQPGQDCRFRVTQLPNGRDFHMSVVRARRNDSGTYLCGAISLAPKAQIKESLRAELRVTERRAEVPTAHPSPSPRPAGQFQTLVTTTPAPRPPTPAPTIASQPLSLRPEACRPAAGGAVHTRGLDFACDIYIWAPLAGTCGVLLLSLVITLYCKRGRKKLLYIFKQPFMRPVQTTQEEDGCSCRFPEEEEGGCELRVKFSRSADAPAYKQGQNQLYNELNLGRREEYDVLDKRRGRDPEMGGKPRRKNPQEGLYNELQKDKMAEAYSEIGMKGERRRGKGHDGLYQGLSTATKDTYDALHMQALPPR

SEQ ID NO: 120 - DNA, 1182 bp, Artificial Sequence
  Description of Artificial Sequence: Synthetic polynucleotide
atggccctccctgtcactgccctgcttctccccctcgcactcctgctccacgccgctagaccacccggatggtttctggactctccggatcgcccgtggaatcccccaaccttctcaccggcactcttggttgtgactgagggcgataatgcgaccttcacgtgctcgttctccaacacctccgaatcattcgtgctgaactggtaccgcatgagcccgtcaaaccagaccgacaagctcgccgcgtttccggaagatcggtcgcaaccgggacaggattgtcggttccgcgtgactcaactgccgaatggcagagacttccacatgagcgtggtccgcgctaggcgaaacgactccgggacctacctgtgcggagccatctcgctggcgcctaaggcccaaatcaaagagagcttgagggccgaactgagagtgaccgagcgcagagctgaggtgccaactgcacatccatccccatcgcctcggcctgcggggcagtttcagaccctggtcacgaccactccggcgccgcgcccaccgactccggccccaactatcgcgagccagcccctgtcgctgaggccggaagcatgccgccctgccgccggaggtgctgtgcatacccggggattggacttcgcatgcgacatctacatttgggctcctctcgccggaacttgtggcgtgctccttctgtccctggtcatcaccctgtactgcaagcggggtcggaaaaagcttctgtacattttcaagcagcccttcatgaggcccgtgcaaaccacccaggaggaggacggttgctcctgccggttccccgaagaggaagaaggaggttgcgagctgcgcgtgaagttctcccggagcgccgacgcccccgcctataagcagggccagaaccagctgtacaacgaactgaacctgggacggcgggaagagtacgatgtgctggacaagcggcgcggccgggaccccgaaatgggcgggaagcctagaagaaagaaccctcaggaaggcctgtataacgagctgcagaaggacaagatggccgaggcctactccgaaattgggatgaagggagagcggcggaggggaaaggggcacgacggcctgtaccaaggactgtccaccgccaccaaggacacatacgatgccctgcacatgcaggcccttccccctcgc

SEQ ID NO: 121 - protein, 394 aa, Artificial Sequence
  Description of Artificial Sequence: Synthetic polypeptide
MALPVTALLLPLALLLHAARPPGWFLDSPDRPWNPPTFSPALLVVTEGDNATFTCSFSNTSESFVLNWYRMSPSNQTDKLAAFPEDRSQPGQDCRFRVTQLPNGRDFHMSVVRARRNDSGTYLCGAISLAPKAQIKESLRAELRVTERRAEVPTAHPSPSPRPAGQFQTLVTTTPAPRPPTPAPTIASQPLSLRPEACRPAAGGAVHTRGLDFACDIYIWAPLAGTCGVLLLSLVITLYCKRGRKKLLYIFKQPFMRPVQTTQEEDGCSCRFPEEEEGGCELRVKFSRSADAPAYKQGQNQLYNELNLGRREEYDVLDKRRGRDPEMGGKPRRKNPQEGLYNELQKDKMAEAYSEIGMKGERRRGKGHDGLYQGLSTATKDTYDALHMQALPPR

SEQ ID NO: 122 - protein, 132 aa, Artificial Sequence
  Description of Artificial Sequence: Synthetic polypeptide
DVPDYASLGGPSSPKKKRKVSRGVQVETISPGDGRTFPKRGQTCVVHYTGMLEDGKKFDSSRDRNKPFKFMLGKQEVIRGWEEGVAQMSVGQRAKLTISPDYAYGATGHPGIIPPHATLVFDVELLKLETSY

SEQ ID NO: 123 - protein, 108 aa, Artificial Sequence
  Description of Artificial Sequence: Synthetic polypeptide
VQVETISPGDGRTFPKRGQTCVVHYTGMLEDGKKFDSSRDRNKPFKFMLGKQEVIRGWEEGVAQMSVGQRAKLTISPDYAYGATGHPGIIPPHATLVFDVELLKLETS

SEQ ID NO: 124 - protein, 93 aa, Artificial Sequence [sequence omitted]

SEQ ID NO: 125 - protein, 95 aa, Artificial Sequence
  Description of Artificial Sequence: Synthetic polypeptide
ILWHEMWHEGLIEASRLYFGERNVKGMFEVLEPLHAMMERGPQTLKETSFNQAYGRDLMEAQEWCRKYMKSGNVKDLTQAWDLYYHVFRRISKTS

SEQ ID NO: 126 - protein, 95 aa, Artificial Sequence
  Description of Artificial Sequence: Synthetic polypeptide
ILWHEMWHEGLLEASRLYFGERNVKGMFEVLEPLHAMMERGPQTLKETSFNQAYGRDLMEAQEWCRKYMKSGNVKDLTQAWDLYYHVFRRISKTS

SEQ ID NO: 127 - protein, 95 aa, Artificial Sequence
  Description of Artificial Sequence: Synthetic polypeptide
ILWHEMWHEGLEEASRLYFGERNVKGMFEVLEPLHAMMERGPQTLKETSFNQAYGRDLMEAQEWCRKYMKSGNVKDLLQAWDLYYHVFRRISKTS

SEQ ID NO: 128 - protein, 95 aa, Artificial Sequence
  Description of Artificial Sequence: Synthetic polypeptide
  MOD_RES (12)..(12): Any amino acid
  MOD_RES (78)..(78): Any amino acid
ILWHEMWHEGLXEASRLYFGERNVKGMFEVLEPLHAMMERGPQTLKETSFNQAYGRDLMEAQEWCRKYMKSGNVKDLXQAWDLYYHVFRRISKTS

SEQ ID NO: 129 - protein, 95 aa, Artificial Sequence
  Description of Artificial Sequence: Synthetic polypeptide
ILWHEMWHEGLIEASRLYFGERNVKGMFEVLEPLHAMMERGPQTLKETSFNQAYGRDLMEAQEWCRKYMKSGNVKDLLQAWDLYYHVFRRISKTS

SEQ ID NO: 130 - protein, 95 aa, Artificial Sequence
  Description of Artificial Sequence: Synthetic polypeptide
ILWHEMWHEGLLEASRLYFGERNVKGMFEVLEPLHAMMERGPQTLKETSFNQAYGRDLMEAQEWCRKYMKSGNVKDLLQAWDLYYHVFRRISKTS

SEQ ID NO: 131-1033 - skipped (903 entries)

SEQ ID NO: 1034 - protein, 7 aa, Artificial Sequence
  Description of Artificial Sequence: Synthetic peptide
AASSLQS

SEQ ID NO: 1035-1311 - skipped (277 entries)

SEQ ID NO: 1312 - DNA, 5 bp, Artificial Sequence
  Description of Artificial Sequence: Synthetic oligonucleotide
ggaaa

SEQ ID NO: 1313 - DNA, 9 bp, Artificial Sequence
  Description of Artificial Sequence: Synthetic oligonucleotide
  modified_base (7)..(7): a, c, t, g, unknown or other
  modified_base (9)..(9): a, c, t, g, unknown or other
  See specification as filed for detailed description of substitutions and preferred embodiments
wggaaanhn

SEQ ID NO: 1314 - DNA, 6 bp, Artificial Sequence
  Description of Artificial Sequence: Synthetic oligonucleotide
gggact

SEQ ID NO: 1315 - DNA, 120 bp, Artificial Sequence
  Description of Artificial Sequence: Synthetic polynucleotide
agcttggatccaagaggaaaatttgtttcatacagaaggcgttaagaggaaaatttgtttcatacagaaggcgttaagaggaaaatttgtttcatacagaaggcgttcaagcttgtcgac

SEQ ID NO: 1316 - protein, 4 aa, Artificial Sequence
  Description of Artificial Sequence: Synthetic peptide
RGDS

SEQ ID NO: 1317 - protein, 41 aa, Artificial Sequence
  Description of Artificial Sequence: Synthetic polypeptide
RSKRSRLLHSDYMNMTPRRPGPTRKHYQPYAPPRDFAAYRS

SEQ ID NO: 1318 - DNA, 123 bp, Artificial Sequence; identical to SEQ ID NO: 52
  Description of Artificial Sequence: Synthetic polynucleotide

SEQ ID NO: 1319 - protein, 35 aa, Unknown
  Description of Unknown: ICOS domain sequence
TKKKYSSSVHDPNGEYMFMRAVNTAKKSRLTDVTL

SEQ ID NO: 1320 - DNA, 105 bp, Unknown
  Description of Unknown: ICOS domain sequence
acaaaaaagaagtattcatccagtgtgcacgaccctaacggtgaatacatgttcatgagagcagtgaacacagccaaaaaatccagactcacagatgtgacccta

SEQ ID NO: 1321 - protein, 35 aa, Artificial Sequence
  Description of Artificial Sequence: Synthetic polypeptide
TKKKYSSSVHDPNGEFMFMRAVNTAKKSRLTDVTL

SEQ ID NO: 1322 - skipped

SEQ ID NO: 1323 - DNA, 521 bp, Unknown
  Description of Unknown: PGK promoter sequence
acccctctctccagccactaagccagttgctccctcggctgacggctgcacgcgaggcctccgaacgtcttacgccttgtggcgcgcccgtccttgtcccgggtgtgatggcggggtgtggggcggagggcgtggcggggaagggccggcgacgagagccgcgcgggacgactcgtcggcgataaccggtgtcgggtagcgccagccgcgcgacggtaacgagggaccgcgacaggcagacgctcccatgatcactctgcacgccgaaggcaaatagtgcaggccgtgcggcgcttggcgttccttggaagggctgaatccccgcctcgtccttcgcagcggccccccgggtgttcccatcgccgcttctaggcccactgcgacgcttgcctgcacttcttacacgctctgggtcccagccgcggcgacgcaaagggccttggtgcgggtctcgtcggcgcagggacgcgtttgggtcccgacggaaccttttccgcgttggggttggggcaccataagct

SEQ ID NO: 1324 - DNA, 118 bp, Artificial Sequence
  Description of Artificial Sequence: Synthetic polynucleotide
acccctctctccagccactaagccagttgctccctcggctgacggctgcacgcgaggcctccgaacgtcttacgccttgtggcgcgcccgtccttgtcccgggtgtgatggcggggtg

SEQ ID NO: 1325 - DNA, 221 bp, Artificial Sequence
  Description of Artificial Sequence: Synthetic polynucleotide
acccctctctccagccactaagccagttgctccctcggctgacggctgcacgcgaggcctccgaacgtcttacgccttgtggcgcgcccgtccttgtcccgggtgtgatggcggggtgtggggcggagggcgtggcggggaagggccggcgacgagagccgcgcgggacgactcgtcggcgataaccggtgtcgggtagcgccagccgcgcgacggtaacg

SEQ ID NO: 1326 - DNA, 324 bp, Artificial Sequence
  Description of Artificial Sequence: Synthetic polynucleotide
acccctctctccagccactaagccagttgctccctcggctgacggctgcacgcgaggcctccgaacgtcttacgccttgtggcgcgcccgtccttgtcccgggtgtgatggcggggtgtggggcggagggcgtggcggggaagggccggcgacgagagccgcgcgggacgactcgtcggcgataaccggtgtcgggtagcgccagccgcgcgacggtaacgagggaccgcgacaggcagacgctcccatgatcactctgcacgccgaaggcaaatagtgcaggccgtgcggcgcttggcgttccttggaagggctgaatccccg

SEQ ID NO: 1327 - DNA, 422 bp, Artificial Sequence
  Description of Artificial Sequence: Synthetic polynucleotide
acccctctctccagccactaagccagttgctccctcggctgacggctgcacgcgaggcctccgaacgtcttacgccttgtggcgcgcccgtccttgtcccgggtgtgatggcggggtgtggggcggagggcgtggcggggaagggccggcgacgagagccgcgcgggacgactcgtcggcgataaccggtgtcgggtagcgccagccgcgcgacggtaacgagggaccgcgacaggcagacgctcccatgatcactctgcacgccgaaggcaaatagtgcaggccgtgcggcgcttggcgttccttggaagggctgaatccccgcctcgtccttcgcagcggccccccgggtgttcccatcgccgcttctaggcccactgcgacgcttgcctgcacttcttacacgctctgggtcccagccg

SEQ ID NO: 1328 - protein, 21 aa, Artificial Sequence
  Description of Artificial Sequence: Synthetic peptide
  MISC_FEATURE (1)..(3): This region may or may not be present
GSGEGRGSLLTCGDVEENPGP

SEQ ID NO: 1329 - protein, 22 aa, Artificial Sequence
  Description of Artificial Sequence: Synthetic peptide
  MISC_FEATURE (1)..(3): This region may or may not be present
GSGATNFSLLKQAGDVEENPGP

SEQ ID NO: 1330 - protein, 23 aa, Artificial Sequence
  Description of Artificial Sequence: Synthetic peptide
  MISC_FEATURE (1)..(3): This region may or may not be present
GSGQCTNYALLKLAGDVESNPGP

SEQ ID NO: 1331 - protein, 25 aa, Artificial Sequence
  Description of Artificial Sequence: Synthetic peptide
  MISC_FEATURE (1)..(3): This region may or may not be present
GSGVKQTLNFDLLKLAGDVESNPGP

SEQ ID NO: 1332-1399 - skipped (68 entries)

SEQ ID NO: 1400 - protein, 239 aa, Artificial Sequence
  Description of Artificial Sequence: Synthetic polypeptide
EVQLVESGGGLVQPGGSLRLSCAVSGFALSNHGMSWVRRAPGKGLEWVSGIVYSGSTYYAASVKGRFTISRDNSRNTLYLQMNSLRPEDTAIYYCSAHGGESDVWGQGTTVTVSSASGGGGSGGRASGGGGSDIQLTQSPSSLSASVGDRVTITCRASQSISSYLNWYQQKPGKAPKLLIYAASSLQSGVPSRFSGSGSGTDFTLTISSLQPEDFATYYCQQSYSTPYTFGQGTKVEIK

SEQ ID NO: 1401 - DNA, 717 bp, Artificial Sequence
  Description of Artificial Sequence: Synthetic polynucleotide
gaagtgcaattggtggaatcagggggaggacttgtgcagcctggaggatcgctgagactgtcatgtgccgtgtccggctttgccctgtccaaccacgggatgtcctgggtccgccgcgcgcctggaaagggcctcgaatgggtgtcgggtattgtgtacagcggtagcacctactatgccgcatccgtgaaggggagattcaccatcagccgggacaactccaggaacactctgtacctccaaatgaattcgctgaggccagaggacactgccatctactactgctccgcgcatggcggagagtccgacgtctggggacaggggaccaccgtgaccgtgtctagcgcgtccggcggaggcggcagcgggggtcgggcatcagggggcggcggatcggacatccagctcacccagtccccgagctcgctgtccgcctccgtgggagatcgggtcaccatcacgtgccgcgccagccagtcgatttcctcctacctgaactggtaccaacagaagcccggaaaagccccgaagcttctcatctacgccgcctcgagcctgcagtcaggagtgccctcacggttctccggctccggttccggtactgatttcaccctgaccatttcctccctgcaaccggaggacttcgctacttactactgccagcagtcgtactccaccccctacactttcggacaaggcaccaaggtcgaaatcaag

SEQ ID NO: 1402 - protein, 115 aa, Artificial Sequence
  Description of Artificial Sequence: Synthetic polypeptide
EVQLVESGGGLVQPGGSLRLSCAVSGFALSNHGMSWVRRAPGKGLEWVSGIVYSGSTYYAASVKGRFTISRDNSRNTLYLQMNSLRPEDTAIYYCSAHGGESDVWGQGTTVTVSS

SEQ ID NO: 1403 - protein, 107 aa, Artificial Sequence
  Description of Artificial Sequence: Synthetic polypeptide
DIQLTQSPSSLSASVGDRVTITCRASQSISSYLNWYQQKPGKAPKLLIYAASSLQSGVPSRFSGSGSGTDFTLTISSLQPEDFATYYCQQSYSTPYTFGQGTKVEIK

SEQ ID NO: 1404 - protein, 483 aa, Artificial Sequence
  Description of Artificial Sequence: Synthetic polypeptide
MALPVTALLLPLALLLHAARPEVQLVESGGGLVQPGGSLRLSCAVSGFALSNHGMSWVRRAPGKGLEWVSGIVYSGSTYYAASVKGRFTISRDNSRNTLYLQMNSLRPEDTAIYYCSAHGGESDVWGQGTTVTVSSASGGGGSGGRASGGGGSDIQLTQSPSSLSASVGDRVTITCRASQSISSYLNWYQQKPGKAPKLLIYAASSLQSGVPSRFSGSGSGTDFTLTISSLQPEDFATYYCQQSYSTPYTFGQGTKVEIKTTTPAPRPPTPAPTIASQPLSLRPEACRPAAGGAVHTRGLDFACDIYIWAPLAGTCGVLLLSLVITLYCKRGRKKLLYIFKQPFMRPVQTTQEEDGCSCRFPEEEEGGCELRVKFSRSADAPAYKQGQNQLYNELNLGRREEYDVLDKRRGRDPEMGGKPRRKNPQEGLYNELQKDKMAEAYSEIGMKGERRRGKGHDGLYQGLSTATKDTYDALHMQALPPR

SEQ ID NO: 1405 - DNA, 1449 bp, Artificial Sequence
  Description of Artificial Sequence: Synthetic polynucleotide
atggccctccctgtcaccgccctgctgcttccgctggctcttctgctccacgccgctcggcccgaagtgcaattggtggaatcagggggaggacttgtgcagcctggaggatcgctgagactgtcatgtgccgtgtccggctttgccctgtccaaccacgggatgtcctgggtccgccgcgcgcctggaaagggcctcgaatgggtgtcgggtattgtgtacagcggtagcacctactatgccgcatccgtgaaggggagattcaccatcagccgggacaactccaggaacactctgtacctccaaatgaattcgctgaggccagaggacactgccatctactactgctccgcgcatggcggagagtccgacgtctggggacaggggaccaccgtgaccgtgtctagcgcgtccggcggaggcggcagcgggggtcgggcatcagggggcggcggatcggacatccagctcacccagtccccgagctcgctgtccgcctccgtgggagatcgggtcaccatcacgtgccgcgccagccagtcgatttcctcctacctgaactggtaccaacagaagcccggaaaagccccgaagcttctcatctacgccgcctcgagcctgcagtcaggagtgccctcacggttctccggctccggttccggtactgatttcaccctgaccatttcctccctgcaaccggaggacttcgctacttactactgccagcagtcgtactccaccccctacactttcggacaaggcaccaaggtcgaaatcaagaccactaccccagcaccgaggccacccaccccggctcctaccatcgcctcccagcctctgtccctgcgtccggaggcatgtagacccgcagctggtggggccgtgcatacccggggtcttgacttcgcctgcgatatctacatttgggcccctctggctggtacttgcggggtcctgctgctttcactcgtgatcactctttactgtaagcgcggtcggaagaagctgctgtacatctttaagcaacccttcatgaggcctgtgcagactactcaagaggaggacggctgttcatgccggttcccagaggaggaggaaggcggctgcgaactgcgcgtgaaattcagccgcagcgcagatgctccagcctacaagcaggggcagaaccagctctacaacgaactcaatcttggtcggagagaggagtacgacgtgctggacaagcggagaggacgggacccagaaatgggcgggaagccgcgcagaaagaatccccaagagggcctgtacaacgagctccaaaaggataagatggcagaagcctatagcgagattggtatgaaaggggaacgcagaagaggcaaaggccacgacggactgtaccagggactcagcaccgccaccaaggacacctatgacgctcttcacatgcaggccctgccgcctcgg

SEQ ID NO: 1406 - protein, 246 aa, Artificial Sequence
  Description of Artificial Sequence: Synthetic polypeptide
QVQLVESGGGLVQPGRSLRLSCAASGFTFSNYAMSWVRQAPGKGLGWVSGISRSGENTYYADSVKGRFTISRDNSKNTLYLQMNSLRDEDTAVYYCARSPAHYYGGMDVWGQGTTVTVSSASGGGGSGGRASGGGGSDIVLTQSPGTLSLSPGERATLSCRASQSISSSFLAWYQQKPGQAPRLLIYGASRRATGIPDRFSGSGSGTDFTLTISRLEPEDSAVYYCQQYHSSPSWTFGQGTKLEIK

SEQ ID NO: 1407 - DNA, 738 bp, Artificial Sequence
  Description of Artificial Sequence: Synthetic polynucleotide
caagtgcaactcgtggaatctggtggaggactcgtgcaacccggaagatcgcttagactgtcgtgtgccgccagcgggttcactttctcgaactacgcgatgtcctgggtccgccaggcacccggaaagggactcggttgggtgtccggcatttcccggtccggcgaaaatacctactacgccgactccgtgaagggccgcttcaccatctcaagggacaacagcaaaaacaccctgtacttgcaaatgaactccctgcgggatgaagatacagccgtgtactattgcgcccggtcgcctgcccattactacggcggaatggacgtctggggacagggaaccactgtgactgtcagcagcgcgtcgggtggcggcggctcagggggtcgggcctccggggggggagggtccgacatcgtgctgacccagtccccgggaaccctgagcctgagcccgggagagcgcgcgaccctgtcatgccgggcatcccagagcattagctcctcctttctcgcctggtatcagcagaagcccggacaggccccgaggctgctgatctacggcgctagcagaagggctaccggaatcccagaccggttctccggctccggttccgggaccgatttcacccttactatctcgcgcctggaacctgaggactccgccgtctactactgccagcagtaccactcatccccgtcgtggacgttcggacagggcaccaagctggagattaag

SEQ ID NO: 1408 - protein, 120 aa, Artificial Sequence
  Description of Artificial Sequence: Synthetic polypeptide
QVQLVESGGGLVQPGRSLRLSCAASGFTFSNYAMSWVRQAPGKGLGWVSGISRSGENTYYADSVKGRFTISRDNSKNTLYLQMNSLRDEDTAVYYCARSPAHYYGGMDVWGQGTTVTVSS

SEQ ID NO: 1409 - protein, 109 aa, Artificial Sequence
  Description of Artificial Sequence: Synthetic polypeptide
DIVLTQSPGTLSLSPGERATLSCRASQSISSSFLAWYQQKPGQAPRLLIYGASRRATGIPDRFSGSGSGTDFTLTISRLEPEDSAVYYCQQYHSSPSWTFGQGTKLEIK

SEQ ID NO: 1410 - protein, 490 aa, Artificial Sequence
  Description of Artificial Sequence: Synthetic polypeptide
MALPVTALLLPLALLLHAARPQVQLVESGGGLVQPGRSLRLSCAASGFTFSNYAMSWVRQAPGKGLGWVSGISRSGENTYYADSVKGRFTISRDNSKNTLYLQMNSLRDEDTAVYYCARSPAHYYGGMDVWGQGTTVTVSSASGGGGSGGRASGGGGSDIVLTQSPGTLSLSPGERATLSCRASQSISSSFLAWYQQKPGQAPRLLIYGASRRATGIPDRFSGSGSGTDFTLTISRLEPEDSAVYYCQQYHSSPSWTFGQGTKLEIKTTTPAPRPPTPAPTIASQPLSLRPEACRPAAGGAVHTRGLDFACDIYIWAPLAGTCGVLLLSLVITLYCKRGRKKLLYIFKQPFMRPVQTTQEEDGCSCRFPEEEEGGCELRVKFSRSADAPAYKQGQNQLYNELNLGRREEYDVLDKRRGRDPEMGGKPRRKNPQEGLYNELQKDKMAEAYSEIGMKGERRRGKGHDGLYQGLSTATKDTYDALHMQALPPR

SEQ ID NO: 1411 - DNA, 1470 bp, Artificial Sequence
  Description of Artificial Sequence: Synthetic polynucleotide
atggccctccctgtcaccgccctgctgcttccgctggctcttctgctccacgccgctcggccccaagtgcaactcgtggaatctggtggaggactcgtgcaacccggaagatcgcttagactgtcgtgtgccgccagcgggttcactttctcgaactacgcgatgtcctgggtccgccaggcacccggaaagggactcggttgggtgtccggcatttcccggtccggcgaaaatacctactacgccgactccgtgaagggccgcttcaccatctcaagggacaacagcaaaaacaccctgtacttgcaaatgaactccctgcgggatgaagatacagccgtgtactattgcgcccggtcgcctgcccattactacggcggaatggacgtctggggacagggaaccactgtgactgtcagcagcgcgtcgggtggcggcggctcagggggtcgggcctccggggggggagggtccgacatcgtgctgacccagtccccgggaaccctgagcctgagcccgggagagcgcgcgaccctgtcatgccgggcatcccagagcattagctcctcctttctcgcctggtatcagcagaagcccggacaggccccgaggctgctgatctacggcgctagcagaagggctaccggaatcccagaccggttctccggctccggttccgggaccgatttcacccttactatctcgcgcctggaacctgaggactccgccgtctactactgccagcagtaccactcatccccgtcgtggacgttcggacagggcaccaagctggagattaagaccactaccccagcaccgaggccacccaccccggctcctaccatcgcctcccagcctctgtccctgcgtccggaggcatgtagacccgcagctggtggggccgtgcatacccggggtcttgacttcgcctgcgatatctacatttgggcccctctggctggtacttgcggggtcctgctgctttcactcgtgatcactctttactgtaagcgcggtcggaagaagctgctgtacatctttaagcaacccttcatgaggcctgtgcagactactcaagaggaggacggctgttcatgccggttcccagaggaggaggaaggcggctgcgaactgcgcgtgaaattcagccgcagcgcagatgctccagcctacaagcaggggcagaaccagctctacaacgaactcaatcttggtcggagagaggagtacgacgtgctggacaagcggagaggacgggacccagaaatgggcgggaagccgcgcagaaagaatccccaagagggcctgtacaacgagctccaaaaggataagatggcagaagcctatagcgagattggtatgaaaggggaacgcagaagaggcaaaggccacgacggactgtaccagggactcagcaccgccaccaaggacacctatgacgctcttcacatgcaggccctgccgcctcgg

SEQ ID NO: 1412 - protein, 244 aa, Artificial Sequence
  Description of Artificial Sequence: Synthetic polypeptide
QVQLVESGGGLVQPGRSLRLSCAASGFTFDDYAMHWVRQAPGKGLEWVSGISWNSGSIGYADSVKGRFTISRDNAKNSLYLQMNSLRAEDTALYYCSVHSFLAYWGQGTLVTVSSASGGGGSGGRASGGGGSDIVMTQTPLSLPVTPGEPASISCRSSQSLLHSNGYNYLDWYLQKPGQSPQLLIYLGSNRASGVPDRFSGSGSGTDFTLKISRVEAEDVGVYYCMQALQTPYTFGQGTKVEIK

SEQ ID NO: 1413 - DNA, 732 bp, Artificial Sequence
  Description of Artificial Sequence: Synthetic polynucleotide
caagtgcaactcgtcgaatccggtggaggtctggtccaacctggtagaagcctgagactgtcgtgtgcggccagcggattcacctttgatgactatgctatgcactgggtgcggcaggccccaggaaagggcctggaatgggtgtcgggaattagctggaactccgggtccattggctacgccgactccgtgaagggccgcttcaccatctcccgcgacaacgcaaagaactccctgtacttgcaaatgaactcgctcagggctgaggataccgcgctgtactactgctccgtgcattccttcctggcctactggggacagggaactctggtcaccgtgtcgagcgcctccggcggcgggggctcgggtggacgggcctcgggcggaggggggtccgacatcgtgatgacccagaccccgctgagcttgcccgtgactcccggagagcctgcatccatctcctgccggtcatcccagtcccttctccactccaacggatacaactacctcgactggtacctccagaagccgggacagagccctcagcttctgatctacctggggtcaaatagagcctcaggagtgccggatcggttcagcggatctggttcgggaactgatttcactctgaagatttcccgcgtggaagccgaggacgtgggcgtctactactgtatgcaggcgctgcagaccccctataccttcggccaagggacgaaagtggagatcaag

SEQ ID NO: 1414 - protein, 115 aa, Artificial Sequence
  Description of Artificial Sequence: Synthetic polypeptide
QVQLVESGGGLVQPGRSLRLSCAASGFTFDDYAMHWVRQAPGKGLEWVSGISWNSGSIGYADSVKGRFTISRDNAKNSLYLQMNSLRAEDTALYYCSVHSFLAYWGQGTLVTVSS

SEQ ID NO: 1415 - protein, 112 aa, Artificial Sequence
  Description of Artificial Sequence: Synthetic polypeptide
DIVMTQTPLSLPVTPGEPASISCRSSQSLLHSNGYNYLDWYLQKPGQSPQLLIYLGSNRASGVPDRFSGSGSGTDFTLKISRVEAEDVGVYYCMQALQTPYTFGQGTKVEIK

SEQ ID NO: 1416 - protein, 488 aa, Artificial Sequence
  Description of Artificial Sequence: Synthetic polypeptide
MALPVTALLLPLALLLHAARPQVQLVESGGGLVQPGRSLRLSCAASGFTFDDYAMHWVRQAPGKGLEWVSGISWNSGSIGYADSVKGRFTISRDNAKNSLYLQMNSLRAEDTALYYCSVHSFLAYWGQGTLVTVSSASGGGGSGGRASGGGGSDIVMTQTPLSLPVTPGEPASISCRSSQSLLHSNGYNYLDWYLQKPGQSPQLLIYLGSNRASGVPDRFSGSGSGTDFTLKISRVEAEDVGVYYCMQALQTPYTFGQGTKVEIKTTTPAPRPPTPAPTIASQPLSLRPEACRPAAGGAVHTRGLDFACDIYIWAPLAGTCGVLLLSLVITLYCKRGRKKLLYIFKQPFMRPVQTTQEEDGCSCRFPEEEEGGCELRVKFSRSADAPAYKQGQNQLYNELNLGRREEYDVLDKRRGRDPEMGGKPRRKNPQEGLYNELQKDKMAEAYSEIGMKGERRRGKGHDGLYQGLSTATKDTYDALHMQALPPR

SEQ ID NO: 1417 - DNA, 1464 bp, Artificial Sequence
  Description of Artificial Sequence: Synthetic polynucleotide
atggccctccctgtcaccgccctgctgcttccgctggctcttctgctccacgccgctcggccccaagtgcaactcgtcgaatccggtggaggtctggtccaacctggtagaagcctgagactgtcgtgtgcggccagcggattcacctttgatgactatgctatgcactgggtgcggcaggccccaggaaagggcctggaatgggtgtcgggaattagctggaactccgggtccattggctacgccgactccgtgaagggccgcttcaccatctcccgcgacaacgcaaagaactccctgtacttgcaaatgaactcgctcagggctgaggataccgcgctgtactactgctccgtgcattccttcctggcctactggggacagggaactctggtcaccgtgtcgagcgcctccggcggcgggggctcgggtggacgggcctcgggcggaggggggtccgacatcgtgatgacccagaccccgctgagcttgcccgtgactcccggagagcctgcatccatctcctgccggtcatcccagtcccttctccactccaacggatacaactacctcgactggtacctccagaagccgggacagagccctcagcttctgatctacctggggtcaaatagagcctcaggagtgccggatcggttcagcggatctggttcgggaactgatttcactctgaagatttcccgcgtggaagccgaggacgtgggcgtctactactgtatgcaggcgctgcagaccccctataccttcggccaagggacgaaagtggagatcaagaccactaccccagcaccgaggccacccaccccggctcctaccatcgcctcccagcctctgtccctgcgtccggaggcatgtagacccgcagctggtggggccgtgcatacccggggtcttgacttcgcctgcgatatctacatttgggcccctctggctggtacttgcggggtcctgctgctttcactcgtgatcactctttactgtaagcgcggtcggaagaagctgctgtacatctttaagcaacccttcatgaggcctgtgcagactactcaagaggaggacggctgttcatgccggttcccagaggaggaggaaggcggctgcgaactgcgcgtgaaattcagccgcagcgcagatgctccagcctacaagcaggggcagaaccagctctacaacgaactcaatcttggtcggagagaggagtacgacgtgctggacaagcggagaggacgggacccagaaatgggcgggaagccgcgcagaaagaatccccaagagggcctgtacaacgagctccaaaaggataagatggcagaagcctatagcgagattggtatgaaaggggaacgcagaagaggcaaaggccacgacggactgtaccagggactcagcaccgccaccaaggacacctatgacgctcttcacatgcaggccctgccgcctcgg

SEQ ID NO: 1418 - protein, 243 aa, Artificial Sequence
  Description of Artificial Sequence: Synthetic polypeptide
EVQLLESGGGLVQPGGSLRLSCAVSGFALSNHGMSWVRRAPGKGLEWVSGIVYSGSTYYAASVKGRFTISRDNSRNTLYLQMNSLRPEDTAIYYCSAHGGESDVWGQGTTVTVSSASGGGGSGGRASGGGGSDIVMTQTPLSLSVTPGQPASISCKSSQSLLRNDGKTPLYWYLQKAGQPPQLLIYEVSNRFSGVPDRFSGSGSGTDFTLKISRVEAEDVGAYYCMQNIQFPSFGGGTKLEIK

SEQ ID NO: 1419 - DNA, 729 bp, Artificial Sequence
  Description of Artificial Sequence: Synthetic polynucleotide
gaagtgcaattgttggaatctggaggaggacttgtgcagcctggaggatcactgagactttcgtgtgcggtgtcaggcttcgccctgagcaaccacggcatgagctgggtgcggagagccccggggaagggtctggaatgggtgtccgggatcgtctactccggttcaacttactacgccgcaagcgtgaagggtcgcttcaccatttcccgcgataactcccggaacaccctgtacctccaaatgaactccctgcggcccgaggacaccgccatctactactgttccgcgcatggaggagagtccgatgtctggggacagggcactaccgtgaccgtgtcgagcgcctcggggggaggaggctccggcggtcgcgcctccggggggggtggcagcgacattgtgatgacgcagactccactctcgctgtccgtgaccccgggacagcccgcgtccatctcgtgcaagagctcccagagcctgctgaggaacgacggaaagactcctctgtattggtacctccagaaggctggacagcccccgcaactgctcatctacgaagtgtcaaatcgcttctccggggtgccggatcggttttccggctcgggatcgggcaccgacttcaccctgaaaatctccagggtcgaggccgaggacgtgggagcctactactgcatgcaaaacatccagttcccttccttcggcggcggcacaaagctggagattaag

SEQ ID NO: 1420 - protein, 115 aa, Artificial Sequence
  Description of Artificial Sequence: Synthetic polypeptide
EVQLLESGGGLVQPGGSLRLSCAVSGFALSNHGMSWVRRAPGKGLEWVSGIVYSGSTYYAASVKGRFTISRDNSRNTLYLQMNSLRPEDTAIYYCSAHGGESDVWGQGTTVTVSS

SEQ ID NO: 1421 - protein, 111 aa, Artificial Sequence
  Description of Artificial Sequence: Synthetic polypeptide
DIVMTQTPLSLSVTPGQPASISCKSSQSLLRNDGKTPLYWYLQKAGQPPQLLIYEVSNRFSGVPDRFSGSGSGTDFTLKISRVEAEDVGAYYCMQNIQFPSFGGGTKLEIK

SEQ ID NO: 1422 - protein, 487 aa, Artificial Sequence
  Description of Artificial Sequence: Synthetic polypeptide
MALPVTALLLPLALLLHAARPEVQLLESGGGLVQPGGSLRLSCAVSGFALSNHGMSWVRRAPGKGLEWVSGIVYSGSTYYAASVKGRFTISRDNSRNTLYLQMNSLRPEDTAIYYCSAHGGESDVWGQGTTVTVSSASGGGGSGGRASGGGGSDIVMTQTPLSLSVTPGQPASISCKSSQSLLRNDGKTPLYWYLQKAGQPPQLLIYEVSNRFSGVPDRFSGSGSGTDFTLKISRVEAEDVGAYYCMQNIQFPSFGGGTKLEIKTTTPAPRPPTPAPTIASQPLSLRPEACRPAAGGAVHTRGLDFACDIYIWAPLAGTCGVLLLSLVITLYCKRGRKKLLYIFKQPFMRPVQTTQEEDGCSCRFPEEEEGGCELRVKFSRSADAPAYKQGQNQLYNELNLGRREEYDVLDKRRGRDPEMGGKPRRKNPQEGLYNELQKDKMAEAYSEIGMKGERRRGKGHDGLYQGLSTATKDTYDALHMQALPPR

SEQ ID NO: 1423 - DNA, 1461 bp, Artificial Sequence
  Description of Artificial Sequence: Synthetic polynucleotide
atggccctccctgtcaccgccctgctgcttccgctggctcttctgctccacgccgctcggcccgaagtgcaattgttggaatctggaggaggacttgtgcagcctggaggatcactgagactttcgtgtgcggtgtcaggcttcgccctgagcaaccacggcatgagctgggtgcggagagccccggggaagggtctggaatgggtgtccgggatcgtctactccggttcaacttactacgccgcaagcgtgaagggtcgcttcaccatttcccgcgataactcccggaacaccctgtacctccaaatgaactccctgcggcccgaggacaccgccatctactactgttccgcgcatggaggagagtccgatgtctggggacagggcactaccgtgaccgtgtcgagcgcctcggggggaggaggctccggcggtcgcgcctccggggggggtggcagcgacattgtgatgacgcagactccactctcgctgtccgtgaccccgggacagcccgcgtccatctcgtgcaagagctcccagagcctgctgaggaacgacggaaagactcctctgtattggtacctccagaaggctggacagcccccgcaactgctcatctacgaagtgtcaaatcgcttctccggggtgccggatcggttttccggctcgggatcgggcaccgacttcaccctgaaaatctccagggtcgaggccgaggacgtgggagcctactactgcatgcaaaacatccagttcccttccttcggcggcggcacaaagctggagattaagaccactaccccagcaccgaggccacccaccccggctcctaccatcgcctcccagcctctgtccctgcgtccggaggcatgtagacccgcagctggtggggccgtgcatacccggggtcttgacttcgcctgcgatatctacatttgggcccctctggctggtacttgcggggtcctgctgctttcactcgtgatcactctttactgtaagcgcggtcggaagaagctgctgtacatctttaagcaacccttcatgaggcctgtgcagactactcaagaggaggacggctgttcatgccggttcccagaggaggaggaaggcggctgcgaactgcgcgtgaaattcagccgcagcgcagatgctccagcctacaagcaggggcagaaccagctctacaacgaactcaatcttggtcggagagaggagtacgacgtgctggacaagcggagaggacgggacccagaaatgggcgggaagccgcgcagaaagaatccccaagagggcctgtacaacgagctccaaaaggataagatggcagaagcctatagcgagattggtatgaaaggggaacgcagaagaggcaaaggccacgacggactgtaccagggactcagcaccgccaccaaggacacctatgacgctcttcacatgcaggccctgccgcctcgg

SEQ ID NO: 1424 - protein, 249 aa, Artificial Sequence
  Description of Artificial Sequence: Synthetic polypeptide
QVQLVQSGAEVRKTGASVKVSCKASGYIFDNFGINWVRQAPGQGLEWMGWINPKNNNTNYAQKFQGRVTITADESTNTAYMEVSSLRSEDTAVYYCARGPYYYQSYMDVWGQGTMVTVSSASGGGGSGGRASGGGGSDIVMTQTPLSLPVTPGEPASISCRSSQSLLHSNGYNYLNWYLQKPGQSPQLLIYLGSKRASGVPDRFSGSGSGTDFTLHITRVGAEDVGVYYCMQALQTPYTFGQGTKLEIK

SEQ ID NO: 1425 - DNA, 747 bp, Artificial Sequence
  Description of Artificial Sequence: Synthetic polynucleotide
caagtccaactcgtccagtccggcgcagaagtcagaaaaaccggtgctagcgtgaaagtgtcctgcaaggcctccggctacattttcgataacttcggaatcaactgggtcagacaggccccgggccaggggctggaatggatgggatggatcaaccccaagaacaacaacaccaactacgcacagaagttccagggccgcgtgactatcaccgccgatgaatcgaccaataccgcctacatggaggtgtcctccctgcggtcggaggacactgccgtgtattactgcgcgaggggcccatactactaccaaagctacatggacgtctggggacagggaaccatggtgaccgtgtcatccgcctccggtggtggaggctccggggggcgggcttcaggaggcggaggaagcgatattgtgatgacccagactccgcttagcctgcccgtgactcctggagaaccggcctccatttcctgccggtcctcgcaatcactcctgcattccaacggttacaactacctgaattggtacctccagaagcctggccagtcgccccagttgctgatctatctgggctcgaagcgcgcctccggggtgcctgaccggtttagcggatctgggagcggcacggacttcactctccacatcacccgcgtgggagcggaggacgtgggagtgtactactgtatgcaggcgctgcagactccgtacacattcggacagggcaccaagctggagatcaag

SEQ ID NO: 1426 - protein, 120 aa, Artificial Sequence
  Description of Artificial Sequence: Synthetic polypeptide
QVQLVQSGAEVRKTGASVKVSCKASGYIFDNFGINWVRQAPGQGLEWMGWINPKNNNTNYAQKFQGRVTITADESTNTAYMEVSSLRSEDTAVYYCARGPYYYQSYMDVWGQGTMVTVSS

SEQ ID NO: 1427 - protein, 112 aa, Artificial Sequence
  Description of Artificial Sequence: Synthetic polypeptide
DIVMTQTPLSLPVTPGEPASISCRSSQSLLHSNGYNYLNWYLQKPGQSPQLLIYLGSKRASGVPDRFSGSGSGTDFTLHITRVGAEDVGVYYCMQALQTPYTFGQGTKLEIK

SEQ ID NO: 1428 - protein, 493 aa, Artificial Sequence
  Description of Artificial Sequence: Synthetic polypeptide
MALPVTALLLPLALLLHAARPQVQLVQSGAEVRKTGASVKVSCKASGYIFDNFGINWVRQAPGQGLEWMGWINPKNNNTNYAQKFQGRVTITADESTNTAYMEVSSLRSEDTAVYYCARGPYYYQSYMDVWGQGTMVTVSSASGGGGSGGRASGGGGSDIVMTQTPLSLPVTPGEPASISCRSSQSLLHSNGYNYLNWYLQKPGQSPQLLIYLGSKRASGVPDRFSGSGSGTDFTLHITRVGAEDVGVYYCMQALQTPYTFGQGTKLEIKTTTPAPRPPTPAPTIASQPLSLRPEACRPAAGGAVHTRGLDFACDIYIWAPLAGTCGVLLLSLVITLYCKRGRKKLLYIFKQPFMRPVQTTQEEDGCSCRFPEEEEGGCELRVKFSRSADAPAYKQGQNQLYNELNLGRREEYDVLDKRRGRDPEMGGKPRRKNPQEGLYNELQKDKMAEAYSEIGMKGERRRGKGHDGLYQGLSTATKDTYDALHMQALPPR

SEQ ID NO: 1429 - DNA, 1479 bp, Artificial Sequence
  Description of Artificial Sequence: Synthetic polynucleotide
atggccctccctgtcaccgccctgctgcttccgctggctcttctgctccacgccgctcggccccaagtccaactcgtccagtccggcgcagaagtcagaaaaaccggtgctagcgtgaaagtgtcctgcaaggcctccggctacattttcgataacttcggaatcaactgggtcagacaggccccgggccaggggctggaatggatgggatggatcaaccccaagaacaacaacaccaactacgcacagaagttccagggccgcgtgactatcaccgccgatgaatcgaccaataccgcctacatggaggtgtcctccctgcggtcggaggacactgccgtgtattactgcgcgaggggcccatactactaccaaagctacatggacgtctggggacagggaaccatggtgaccgtgtcatccgcctccggtggtggaggctccggggggcgggcttcaggaggcggaggaagcgatattgtgatgacccagactccgcttagcctgcccgtgactcctggagaaccggcctccatttcctgccggtcctcgcaatcactcctgcattccaacggttacaactacctgaattggtacctccagaagcctggccagtcgccccagttgctgatctatctgggctcgaagcgcgcctccggggtgcctgaccggtttagcggatctgggagcggcacggacttcactctccacatcacccgcgtgggagcggaggacgtgggagtgtactactgtatgcaggcgctgcagactccgtacacattcggacagggcaccaagctggagatcaagaccactaccccagcaccgaggccacccaccccggctcctaccatcgcctcccagcctctgtccctgcgtccggaggcatgtagacccgcagctggtggggccgtgcatacccggggtcttgacttcgcctgcgatatctacatttgggcccctctggctggtacttgcggggtcctgctgctttcactcgtgatcactctttactgtaagcgcggtcggaagaagctgctgtacatctttaagcaacccttcatgaggcctgtgcagactactcaagaggaggacggctgttcatgccggttcccagaggaggaggaaggcggctgcgaactgcgcgtgaaattcagccgcagcgcagatgctccagcctacaagcaggggcagaaccagctctacaacgaactcaatcttggtcggagagaggagtacgacgtgctggacaagcggagaggacgggacccagaaatgggcgggaagccgcgcagaaagaatccccaagagggcctgtacaacgagctccaaaaggataagatggcagaagcctatagcgagattggtatgaaaggggaacgcagaagaggcaaaggccacgacggactgtaccagggactcagcaccgccaccaaggacacctatgacgctcttcacatgcaggccctgccgcctcgg

SEQ ID NO: 1430 - protein, 246 aa, Artificial Sequence
  Description of Artificial Sequence: Synthetic polypeptide
QVQLQESGGGLVQPGGSLRLSCAASGFTFSSDAMTWVRQAPGKGLEWVSVISGSGGTTYYADSVKGRFTISRDNSKNTLYLQMNSLRAEDTAVYYCAKLDSSGYYYARGPRYWGQGTLVTVSSASGGGGSGGRASGGGGSDIQLTQSPSSLSASVGDRVTITCRASQSISSYLNWYQQKPGKAPKLLIYGASTLASGVPARFSGSGSGTHFTLTINSLQSEDSATYYCQQSYKRASFGQGTKVEIK

SEQ ID NO: 1431 - DNA, 738 bp, Artificial Sequence
  Description of Artificial Sequence: Synthetic polynucleotide
caagtgcaacttcaagaatcaggcggaggactcgtgcagcccggaggatcattgcggctctcgtgcgccgcctcgggcttcaccttctcgagcgacgccatgacctgggtccgccaggccccggggaaggggctggaatgggtgtctgtgatttccggctccgggggaactacgtactacgccgattccgtgaaaggtcgcttcactatctcccgggacaacagcaagaacaccctttatctgcaaatgaattccctccgcgccgaggacaccgccgtgtactactgcgccaagctggactcctcgggctactactatgcccggggtccgagatactggggacagggaaccctcgtgaccgtgtcctccgcgtccggcggaggagggtcgggagggcgggcctccggcggcggcggttcggacatccagctgacccagtccccatcctcactgagcgcaagcgtgggcgacagagtcaccattacatgcagggcgtcccagagcatcagctcctacctgaactggtaccaacagaagcctggaaaggctcctaagctgttgatctacggggcttcgaccctggcatccggggtgcccgcgaggtttagcggaagcggtagcggcactcacttcactctgaccattaacagcctccagtccgaggattcagccacttactactgtcagcagtcctacaagcgggccagcttcggacagggcactaaggtcgagatcaag

SEQ ID NO: 1432 - protein, 123 aa, Artificial Sequence
  Description of Artificial Sequence: Synthetic polypeptide
QVQLQESGGGLVQPGGSLRLSCAASGFTFSSDAMTWVRQAPGKGLEWVSVISGSGGTTYYADSVKGRFTISRDNSKNTLYLQMNSLRAEDTAVYYCAKLDSSGYYYARGPRYWGQGTLVTVSS

SEQ ID NO: 1433 - protein, 106 aa, Artificial Sequence
  Description of Artificial Sequence: Synthetic polypeptide
DIQLTQSPSSLSASVGDRVTITCRASQSISSYLNWYQQKPGKAPKLLIYGASTLASGVPARFSGSGSGTHFTLTINSLQSEDSATYYCQQSYKRASFGQGTKVEIK

SEQ ID NO: 1434 - protein, 490 aa, Artificial Sequence
  Description of Artificial Sequence: Synthetic polypeptide
MALPVTALLLPLALLLHAARPQVQLQESGGGLVQPGGSLRLSCAASGFTFSSDAMTWVRQAPGKGLEWVSVISGSGGTTYYADSVKGRFTISRDNSKNTLYLQMNSLRAEDTAVYYCAKLDSSGYYYARGPRYWGQGTLVTVSSASGGGGSGGRASGGGGSDIQLTQSPSSLSASVGDRVTITCRASQSISSYLNWYQQKPGKAPKLLIYGASTLASGVPARFSGSGSGTHFTLTINSLQSEDSATYYCQQSYKRASFGQGTKVEIKTTTPAPRPPTPAPTIASQPLSLRPEACRPAAGGAVHTRGLDFACDIYIWAPLAGTCGVLLLSLVITLYCKRGRKKLLYIFKQPFMRPVQTTQEEDGCSCRFPEEEEGGCELRVKFSRSADAPAYKQGQNQLYNELNLGRREEYDVLDKRRGRDPEMGGKPRRKNPQEGLYNELQKDKMAEAYSEIGMKGERRRGKGHDGLYQGLSTATKDTYDALHMQALPPR

SEQ ID NO: 1435 - DNA, 1470 bp, Artificial Sequence
  Description of Artificial Sequence: Synthetic polynucleotide
atggccctccctgtcaccgccctgctgcttccgctggctcttctgctccacgccgctcggccccaagtgcaacttcaagaatcaggcggaggactcgtgcagcccggaggatcattgcggctctcgtgcgccgcctcgggcttcaccttctcgagcgacgccatgacctgggtccgccaggccccggggaaggggctggaatgggtgtctgtgatttccggctccgggggaactacgtactacgccgattccgtgaaaggtcgcttcactatctcccgggacaacagcaagaacaccctttatctgcaaatgaattccctccgcgccgaggacaccgccgtgtactactgcgccaagctggactcctcgggctactactatgcccggggtccgagatactggggacagggaaccctcgtgaccgtgtcctccgcgtccggcggaggagggtcgggagggcgggcctccggcggcggcggttcggacatccagctgacccagtccccatcctcactgagcgcaagcgtgggcgacagagtcaccattacatgcagggcgtcccagagcatcagctcctacctgaactggtaccaacagaagcctggaaaggctcctaagctgttgatctacggggcttcgaccctggcatccggggtgcccgcgaggtttagcggaagcggtagcggcactcacttcactctgaccattaacagcctccagtccgaggattcagccacttactactgtcagcagtcctacaagcgggccagcttcggacagggcactaaggtcgagatcaagaccactaccccagcaccgaggccacccaccccggctcctaccatcgcctcccagcctctgtccctgcgtccggaggcatgtagacccgcagctggtggggccgtgcatacccggggtcttgacttcgcctgcgatatctacatttgggcccctctggctggtacttgcggggtcctgctgctttcactcgtgatcactctttactgtaagcgcggtcggaagaagctgctgtacatctttaagcaacccttcatgaggcctgtgcagactactcaagaggaggacggctgttcatgccggttcccagaggaggaggaaggcggctgcgaactgcgcgtgaaattcagccgcagcgcagatgctccagcctacaagcaggggcagaaccagctctacaacgaactcaatcttggtcggagagaggagtacgacgtgctggacaagcggagaggacgggacccagaaatgggcgggaagccgcgcagaaagaatccccaagagggcctgtacaacgagctccaaaaggataagatggcagaagcctatagcgagattggtatgaaaggggaacgcagaagaggcaaaggccacgacggactgtaccagggactcagcaccgccaccaaggacacctatgacgctcttcacatgcaggccctgccgcctcgg

SEQ ID NO: 1436 - protein, 247 aa, Artificial Sequence
  Description of Artificial Sequence: Synthetic polypeptide
QVQLVQSGAEVKKPGASVKVSCKASGYTFSNYGITWVRQAPGQGLEWMGWISAYNGNTNYAQKFQGRVTMTRNTSISTAYMELSSLRSEDTAVYYCARGPYYYYMDVWGKGTMVTVSSASGGGGSGGRASGGGGSEIVMTQSPLSLPVTPGEPASISCRSSQSLLYSNGYNYVDWYLQKPGQSPQLLIYLGSNRASGVPDRFSGSGSGTDFKLQISRVEAEDVGIYYCMQGRQFPYSFGQGTKVEIK

SEQ ID NO: 1437 - DNA, 741 bp, Artificial Sequence
  Description of Artificial Sequence: Synthetic polynucleotide
caagtccaactggtccagagcggtgcagaagtgaagaagcccggagcgagcgtgaaagtgtcctgcaaggcttccgggtacaccttctccaactacggcatcacttgggtgcgccaggccccgggacagggcctggaatggatggggtggatttccgcgtacaacggcaatacgaactacgctcagaagttccagggtagagtgaccatgactaggaacacctccatttccaccgcctacatggaactgtcctccctgcggagcgaggacaccgccgtgtactattgcgcccggggaccatactactactacatggatgtctgggggaaggggactatggtcaccgtgtcatccgcctcgggaggcggcggatcaggaggacgcgcctctggtggtggaggatcggagatcgtgatgacccagagccctctctccttgcccgtgactcctggggagcccgcatccatttcatgccggagctcccagtcacttctctactccaacggctataactacgtggattggtacctccaaaagccgggccagagcccgcagctgctgatctacctgggctcgaacagggccagcggagtgcctgaccggttctccgggtcgggaagcgggaccgacttcaagctgcaaatctcgagagtggaggccgaggacgtgggaatctactactgtatgcagggccgccagtttccgtactcgttcggacagggcaccaaagtggaaatcaag

SEQ ID NO: 1438 - protein, 118 aa, Artificial Sequence
  Description of Artificial Sequence: Synthetic polypeptide
QVQLVQSGAEVKKPGASVKVSCKASGYTFSNYGITWVRQAPGQGLEWMGWISAYNGNTNYAQKFQGRVTMTRNTSISTAYMELSSLRSEDTAVYYCARGPYYYYMDVWGKGTMVTVSS

SEQ ID NO: 1439 - protein, 112 aa, Artificial Sequence
  Description of Artificial Sequence: Synthetic polypeptide
EIVMTQSPLSLPVTPGEPASISCRSSQSLLYSNGYNYVDWYLQKPGQSPQLLIYLGSNRASGVPDRFSGSGSGTDFKLQISRVEAEDVGIYYCMQGRQFPYSFGQGTKVEIK

SEQ ID NO: 1440 - protein, 491 aa, Artificial Sequence
  Description of Artificial Sequence: Synthetic polypeptide
MALPVTALLLPLALLLHAARPQVQLVQSGAEVKKPGASVKVSCKASGYTFSNYGITWVRQAPGQGLEWMGWISAYNGNTNYAQKFQGRVTMTRNTSISTAYMELSSLRSEDTAVYYCARGPYYYYMDVWGKGTMVTVSSASGGGGSGGRASGGGGSEIVMTQSPLSLPVTPGEPASISCRSSQSLLYSNGYNYVDWYLQKPGQSPQLLIYLGSNRASGVPDRFSGSGSGTDFKLQISRVEAEDVGIYYCMQGRQFPYSFGQGTKVEIKTTTPAPRPPTPAPTIASQPLSLRPEACRPAAGGAVHTRGLDFACDIYIWAPLAGTCGVLLLSLVITLYCKRGRKKLLYIFKQPFMRPVQTTQEEDGCSCRFPEEEEGGCELRVKFSRSADAPAYKQGQNQLYNELNLGRREEYDVLDKRRGRDPEMGGKPRRKNPQEGLYNELQKDKMAEAYSEIGMKGERRRGKGHDGLYQGLSTATKDTYDALHMQALPPR

SEQ ID NO: 1441 - DNA, 1473 bp, Artificial Sequence
  Description of Artificial Sequence: Synthetic polynucleotide
atggccctccctgtcaccgccctgctgcttccgctggctcttctgctccacgccgctcggccccaagtccaactggtccagagcggtgcagaagtgaagaagcccggagcgagcgtgaaagtgtcctgcaaggcttccgggtacaccttctccaactacggcatcacttgggtgcgccaggccccgggacagggcctggaatggatggggtggatttccgcgtacaacggcaatacgaactacgctcagaagttccagggtagagtgaccatgactaggaacacctccatttccaccgcctacatggaactgtcctccctgcggagcgaggacaccgccgtgtactattgcgcccggggaccatactactactacatggatgtctgggggaaggggactatggtcaccgtgtcatccgcctcgggaggcggcggatcaggaggacgcgcctctggtggtggaggatcggagatcgtgatgacccagagccctctctccttgcccgtgactcctggggagcccgcatccatttcatgccggagctcccagtcacttctctactccaacggctataactacgtggattggtacctccaaaagccgggccagagcccgcagctgctgatctacctgggctcgaacagggccagcggagtgcctgaccggttctccgggtcgggaagcgggaccgacttcaagctgcaaatctcgagagtggaggccgaggacgtgggaatctactactgtatgcagggccgccagtttccgtactcgttcggacagggcaccaaagtggaaatcaagaccactaccccagcaccgaggccacccaccccggctcctaccatcgcctcccagcctctgtccctgcgtccggaggcatgtagacccgcagctggtggggccgtgcatacccggggtcttgacttcgcctgcgatatctacatttgggcccctctggctggtacttgcggggtcctgctgctttcactcgtgatcactctttactgtaagcgcggtcggaagaagctgctgtacatctttaagcaacccttcatgaggcctgtgcagactactcaagaggaggacggctgttcatgccggttcccagaggaggaggaaggcggctgcgaactgcgcgtgaaattcagccgcagcgcagatgctccagcctacaagcaggggcagaaccagctctacaacgaactcaatcttggtcggagagaggagtacgacgtgctggacaagcggagaggacgggacccagaaatgggcgggaagccgcgcagaaagaatccccaagagggcctgtacaacgagctccaaaaggataagatggcagaagcctatagcgagattggtatgaaaggggaacgcagaagaggcaaaggccacgacggactgtaccagggactcagcaccgccaccaaggacacctatgacgctcttcacatgcaggccctgccgcctcgg

SEQ ID NO: 1442 - protein, 238 aa, Artificial Sequence
  Description of Artificial Sequence: Synthetic polypeptide
EVQLLETGGGLVQPGGSLRLSCAVSGFALSNHGMSWVRRAPGKGLEWVSGIVYSGSTYYAASVKGRFTISRDNSRNTLYLQMNSLRPEDTAIYYCSAHGGESDVWGQGTTVTVSSASGGGGSGGRASGGGGSEIVLTQSPATLSVSPGESATLSCRASQSVSSNLAWYQQKPGQAPRLLIYGASTRASGIPDRFSGSGSGTDFTLTISSLQAEDVAVYYCQQYGSSLTFGGGTKVEIK

SEQ ID NO: 1443 - DNA, 714 bp, Artificial Sequence
  Description of Artificial Sequence: Synthetic polynucleotide
gaagtgcaattgctcgaaactggaggaggtctggtgcaacctggaggatcacttcgcctgtcctgcgccgtgtcgggctttgccctgtccaaccatggaatgagctgggtccgccgcgcgccggggaagggcctcgaatgggtgtccggcatcgtctactccggctccacctactacgccgcgtccgtgaagggccggttcacgatttcacgggacaactcgcggaacaccctgtacctccaaatgaattcccttcggccggaggatactgccatctactactgctccgcccacggtggcgaatccgacgtctggggccagggaaccaccgtgaccgtgtccagcgcgtccgggggaggaggaagcgggggtagagcatcgggtggaggcggatcagagatcgtgctgacccagtcccccgccaccttgagcgtgtcaccaggagagtccgccaccctgtcatgccgcgccagccagtccgtgtcctccaacctggcttggtaccagcagaagccggggcaggcccctagactcctgatctatggggcgtcgacccgggcatctggaattcccgataggttcagcggatcgggctcgggcactgacttcactctgaccatctcctcgctgcaagccgaggacgtggctgtgtactactgtcagcagtacggaagctccctgactttcggtggcgggaccaaagtcgagattaag

SEQ ID NO: 1444 - protein, 115 aa, Artificial Sequence
  Description of Artificial Sequence: Synthetic polypeptide
EVQLLETGGGLVQPGGSLRLSCAVSGFALSNHGMSWVRRAPGKGLEWVSGIVYSGSTYYAASVKGRFTISRDNSRNTLYLQMNSLRPEDTAIYYCSAHGGESDVWGQGTTVTVSS

SEQ ID NO: 1445 - protein, 106 aa, Artificial Sequence
  Description of Artificial Sequence: Synthetic polypeptide
EIVLTQSPATLSVSPGESATLSCRASQSVSSNLAWYQQKPGQAPRLLIYGASTRASGIPDRFSGSGSGTDFTLTISSLQAEDVAVYYCQQYGSSLTFGGGTKVEIK

SEQ ID NO: 1446 - protein, 482 aa, Artificial Sequence
  Description of Artificial Sequence: Synthetic polypeptide
MALPVTALLLPLALLLHAARPEVQLLETGGGLVQPGGSLRLSCAVSGFALSNHGMSWVRRAPGKGLEWVSGIVYSGSTYYAASVKGRFTISRDNSRNTLYLQMNSLRPEDTAIYYCSAHGGESDVWGQGTTVTVSSASGGGGSGGRASGGGGSEIVLTQSPATLSVSPGESATLSCRASQSVSSNLAWYQQKPGQAPRLLIYGASTRASGIPDRFSGSGSGTDFTLTISSLQAEDVAVYYCQQYGSSLTFGGGTKVEIKTTTPAPRPPTPAPTIASQPLSLRPEACRPAAGGAVHTRGLDFACDIYIWAPLAGTCGVLLLSLVITLYCKRGRKKLLYIFKQPFMRPVQTTQEEDGCSCRFPEEEEGGCELRVKFSRSADAPAYKQGQNQLYNELNLGRREEYDVLDKRRGRDPEMGGKPRRKNPQEGLYNELQKDKMAEAYSEIGMKGERRRGKGHDGLYQGLSTATKDTYDALHMQALPPR

SEQ ID NO: 1447 - DNA, 1446 bp, Artificial Sequence
  Description of Artificial Sequence: Synthetic polynucleotide
atggccctccctgtcaccgccctgctgcttccgctggctcttctgctccacgccgctcggcccgaagtgcaattgctcgaaactggaggaggtctggtgcaacctggaggatcacttcgcctgtcctgcgccgtgtcgggctttgccctgtccaaccatggaatgagctgggtccgccgcgcgccggggaagggcctcgaatgggtgtccggcatcgtctactccggctccacctactacgccgcgtccgtgaagggccggttcacgatttcacgggacaactcgcggaacaccctgtacctccaaatgaattcccttcggccggaggatactgccatctactactgctccgcccacggtggcgaatccgacgtctggggccagggaaccaccgtgaccgtgtccagcgcgtccgggggaggaggaagcgggggtagagcatcgggtggaggcggatcagagatcgtgctgacccagtcccccgccaccttgagcgtgtcaccaggagagtccgccaccctgtcatgccgcgccagccagtccgtgtcctccaacctggcttggtaccagcagaagccggggcaggcccctagactcctgatctatggggcgtcgacccgggcatctggaattcccgataggttcagcggatcgggctcgggcactgacttcactctgaccatctcctcgctgcaagccgaggacgtggctgtgtactactgtcagcagtacggaagctccctgactttcggtggcgggaccaaagtcgagattaagaccactaccccagcaccgaggccacccaccccggctcctaccatcgcctcccagcctctgtccctgcgtccggaggcatgtagacccgcagctggtggggccgtgcatacccggggtcttgacttcgcctgcgatatctacatttgggcccctctggctggtacttgcggggtcctgctgctttcactcgtgatcactctttactgtaagcgcggtcggaagaagctgctgtacatctttaagcaacccttcatgaggcctgtgcagactactcaagaggaggacggctgttcatgccggttcccagaggaggaggaaggcggctgcgaactgcgcgtgaaattcagccgcagcgcagatgctccagcctacaagcaggggcagaaccagctctacaacgaactcaatcttggtcggagagaggagtacgacgtgctggacaagcggagaggacgggacccagaaatgggcgggaagccgcgcagaaagaatccccaagagggcctgtacaacgagctccaaaaggataagatggcagaagcctatagcgagattggtatgaaaggggaacgcagaagaggcaaaggccacgacggactgtaccagggactcagcaccgccaccaaggacacctatgacgctcttcacatgcaggccctgccgcctcgg

SEQ ID NO: 1448 - protein, 239 aa, Artificial Sequence
  Description of Artificial Sequence: Synthetic polypeptide
EVQLVETGGGLVQPGGSLRLSCAVSGFALSNHGMSWVRRAPGKGLEWVSGIVYSGSTYYAASVKGRFTISRDNSRNTLYLQMNSLRPEDTAIYYCSAHGGESDVWGQGTTVTVSSASGGGGSGGRASGGGGSEIVMTQSPATLSVSPGERATLSCRASQSVSSKLAWYQQKPGQAPRLLMYGASIRATGIPDRFSGSGSGTEFTLTISSLEPEDFAVYYCQQYGSSSWTFGQGTKVEIK

SEQ ID NO: 1449 - DNA, 717 bp, Artificial Sequence
  Description of Artificial Sequence: Synthetic polynucleotide
gaagtgcaattggtggaaactggaggaggacttgtgcaacctggaggatcattgagactgagctgcgcagtgtcgggattcgccctgagcaaccatggaatgtcctgggtcagaagggcccctggaaaaggcctcgaatgggtgtcagggatcgtgtactccggttccacttactacgccgcctccgtgaaggggcgcttcactatctcacgggataactcccgcaataccctgtacctccaaatgaacagcctgcggccggaggataccgccatctactactgttccgcccacggtggagagtctgacgtctggggccagggaactaccgtgaccgtgtcctccgcgtccggcggtggagggagcggcggccgcgccagcggcggcggaggctccgagatcgtgatgacccagagccccgctactctgtcggtgtcgcccggagaaagggcgaccctgtcctgccgggcgtcgcagtccgtgagcagcaagctggcttggtaccagcagaagccgggccaggcaccacgcctgcttatgtacggtgcctccattcgggccaccggaatcccggaccggttctcggggtcggggtccggtaccgagttcacactgaccatttcctcgctcgagcccgaggactttgccgtctattactgccagcagtacggctcctcctcatggacgttcggccaggggaccaaggtcgaaatcaag

SEQ ID NO: 1450 - protein, 115 aa, Artificial Sequence
  Description of Artificial Sequence: Synthetic polypeptide
EVQLVETGGGLVQPGGSLRLSCAVSGFALSNHGMSWVRRAPGKGLEWVSGIVYSGSTYYAASVKGRFTISRDNSRNTLYLQMNSLRPEDTAIYYCSAHGGESDVWGQGTTVTVSS

SEQ ID NO: 1451 - protein, 107 aa, Artificial Sequence
  Description of Artificial Sequence: Synthetic polypeptide
EIVMTQSPATLSVSPGERATLSCRASQSVSSKLAWYQQKPGQAPRLLMYGASIRATGIPDRFSGSGSGTEFTLTISSLEPEDFAVYYCQQYGSSSWTFGQGTKVEIK

SEQ ID NO: 1452 - protein, 483 aa, Artificial Sequence
  Description of Artificial Sequence: Synthetic polypeptide
MALPVTALLLPLALLLHAARPEVQLVETGGGLVQPGGSLRLSCAVSGFALSNHGMSWVRRAPGKGLEWVSGIVYSGSTYYAASVKGRFTISRDNSRNTLYLQMNSLRPEDTAIYYCSAHGGESDVWGQGTTVTVSSASGGGGSGGRASGGGGSEIVMTQSPATLSVSPGERATLSCRASQSVSSKLAWYQQKPGQAPRLLMYGASIRATGIPDRFSGSGSGTEFTLTISSLEPEDFAVYYCQQYGSSSWTFGQGTKVEIKTTTPAPRPPTPAPTIASQPLSLRPEACRPAAGGAVHTRGLDFACDIYIWAPLAGTCGVLLLSLVITLYCKRGRKKLLYIFKQPFMRPVQTTQEEDGCSCRFPEEEEGGCELRVKFSRSADAPAYKQGQNQLYNELNLGRREEYDVLDKRRGRDPEMGGKPRRKNPQEGLYNELQKDKMAEAYSEIGMKGERRRGKGHDGLYQGLSTATKDTYDALHMQALPPR

SEQ ID NO: 1453 - DNA, 1449 bp, Artificial Sequence
  Description of Artificial Sequence: Synthetic polynucleotide
atggccctccctgtcaccgccctgctgcttccgctggctcttctgctccacgccgctcggcccgaagtgcaattggtggaaactggaggaggacttgtgcaacctggaggatcattgagactgagctgcgcagtgtcgggattcgccctgagcaaccatggaatgtcctgggtcagaagggcccctggaaaaggcctcgaatgggtgtcagggatcgtgtactccggttccacttactacgccgcctccgtgaaggggcgcttcactatctcacgggataactcccgcaataccctgtacctccaaatgaacagcctgcggccggaggataccgccatctactactgttccgcccacggtggagagtctgacgtctggggccagggaactaccgtgaccgtgtcctccgcgtccggcggtggagggagcggcggccgcgccagcggcggcggaggctccgagatcgtgatgacccagagccccgctactctgtcggtgtcgcccggagaaagggcgaccctgtcctgccgggcgtcgcagtccgtgagcagcaagctggcttggtaccagcagaagccgggccaggcaccacgcctgcttatgtacggtgcctccattcgggccaccggaatcccggaccggttctcggggtcggggtccggtaccgagttcacactgaccatttcctcgctcgagcccgaggactttgccgtctattactgccagcagtacggctcctcctcatggacgttcggccaggggaccaaggtcgaaatcaagaccactaccccagcaccgaggccacccaccccggctcctaccatcgcctcccagcctctgtccctgcgtccggaggcatgtagacccgcagctggtggggccgtgcatacccggggtcttgacttcgcctgcgatatctacatttgggcccctctggctggtacttgcggggtcctgctgctttcactcgtgatcactctttactgtaagcgcggtcggaagaagctgctgtacatctttaagcaacccttcatgaggcctgtgcagactactcaagaggaggacggctgttcatgccggttcccagaggaggaggaaggcggctgcgaactgcgcgtgaaattcagccgcagcgcagatgctccagcctacaagcaggggcagaaccagctctacaacgaactcaatcttggtcggagagaggagtacgacgtgctggacaagcggagaggacgggacccagaaatgggcgggaagccgcgcagaaagaatccccaagagggcctgtacaacgagctccaaaaggataagatggcagaagcctatagcgagattggtatgaaaggggaacgcagaagaggcaaaggccacgacggactgtaccagggactcagcaccgccaccaaggacacctatgacgctcttcacatgcaggccctgccgcctcgg

SEQ ID NO: 1454 - protein, 241 aa, Artificial Sequence
  Description of Artificial Sequence: Synthetic polypeptide
EVQLVETGGGVVQPGGSLRLSCAVSGFALSNHGMSWVRRAPGKGLEWVSGIVYSGSTYYAASVKGRFTISRDNSRNTLYLQMNSLRPEDTAIYYCSAHGGESDVWGQGTTVTVSSASGGGGSGGRASGGGGSEIVLTQSPGTLSLSPGERATLSCRASQSVGSTNLAWYQQKPGQAPRLLIYDASNRATGIPDRFSGGGSGTDFTLTISRLEPEDFAVYYCQQYGSSPPWTFGQGTKVEIK

SEQ ID NO: 1455 - DNA, 723 bp, Artificial Sequence
  Description of Artificial Sequence: Synthetic polynucleotide
gaagtgcaattggtggagactggaggaggagtggtgcaacctggaggaagcctgagactgtcatgcgcggtgtcgggcttcgccctctccaaccacggaatgtcctgggtccgccgggcccctgggaaaggacttgaatgggtgtccggcatcgtgtactcgggttccacctactacgcggcctcagtgaagggccggtttactattagccgcgacaactccagaaacacactgtacctccaaatgaactcgctgcggccggaagataccgctatctactactgctccgcccatgggggagagtcggacgtctggggacagggcaccactgtcactgtgtccagcgcttccggcggtggtggaagcgggggacgggcctcaggaggcggtggcagcgagattgtgctgacccagtcccccgggaccctgagcctgtccccgggagaaagggccaccctctcctgtcgggcatcccagtccgtggggtctactaaccttgcatggtaccagcagaagcccggccaggcccctcgcctgctgatctacgacgcgtccaatagagccaccggcatcccggatcgcttcagcggaggcggatcgggcaccgacttcaccctcaccatttcaaggctggaaccggaggacttcgccgtgtactactgccagcagtatggttcgtccccaccctggacgttcggccaggggactaaggtcgagatcaag

SEQ ID NO: 1456 - protein, 115 aa, Artificial Sequence
  Description of Artificial Sequence: Synthetic polypeptide
EVQLVETGGGVVQPGGSLRLSCAVSGFALSNHGMSWVRRAPGKGLEWVSGIVYSGSTYYAASVKGRFTISRDNSRNTLYLQMNSLRPEDTAIYYCSAHGGESDVWGQGTTVTVSS

SEQ ID NO: 1457 - protein, 109 aa, Artificial Sequence
  Description of Artificial Sequence: Synthetic polypeptide
EIVLTQSPGTLSLSPGERATLSCRASQSVGSTNLAWYQQKPGQAPRLLIYDASNRATGIPDRFSGGGSGTDFTLTISRLEPEDFAVYYCQQYGSSPPWTFGQGTKVEIK

SEQ ID NO: 1458 - protein, 485 aa, Artificial Sequence
  Description of Artificial Sequence: Synthetic polypeptide
MALPVTALLLPLALLLHAARPEVQLVETGGGVVQPGGSLRLSCAVSGFALSNHGMSWVRRAPGKGLEWVSGIVYSGSTYYAASVKGRFTISRDNSRNTLYLQMNSLRPEDTAIYYCSAHGGESDVWGQGTTVTVSSASGGGGSGGRASGGGGSEIVLTQSPGTLSLSPGERATLSCRASQSVGSTNLAWYQQKPGQAPRLLIYDASNRATGIPDRFSGGGSGTDFTLTISRLEPEDFAVYYCQQYGSSPPWTFGQGTKVEIKTTTPAPRPPTPAPTIASQPLSLRPEACRPAAGGAVHTRGLDFACDIYIWAPLAGTCGVLLLSLVITLYCKRGRKKLLYIFKQPFMRPVQTTQEEDGCSCRFPEEEEGGCELRVKFSRSADAPAYKQGQNQLYNELNLGRREEYDVLDKRRGRDPEMGGKPRRKNPQEGLYNELQKDKMAEAYSEIGMKGERRRGKGHDGLYQGLSTATKDTYDALHMQALPPR

SEQ ID NO: 1459 - DNA, 1455 bp, Artificial Sequence
  Description of Artificial Sequence: Synthetic polynucleotide
atggccctccctgtcaccgccctgctgcttccgctggctcttctgctccacgccgctcggcccgaagtgcaattggtggagactggaggaggagtggtgcaacctggaggaagcctgagactgtcatgcgcggtgtcgggcttcgccctctccaaccacggaatgtcctgggtccgccgggcccctgggaaaggacttgaatgggtgtccggcatcgtgtactcgggttccacctactacgcggcctcagtgaagggccggtttactattagccgcgacaactccagaaacacactgtacctccaaatgaactcgctgcggccggaagataccgctatctactactgctccgcccatgggggagagtcggacgtctggggacagggcaccactgtcactgtgtccagcgcttccggcggtggtggaagcgggggacgggcctcaggaggcggtggcagcgagattgtgctgacccagtcccccgggaccctgagcctgtccccgggagaaagggccaccctctcctgtcgggcatcccagtccgtggggtctactaaccttgcatggtaccagcagaagcccggccaggcccctcgcctgctgatctacgacgcgtccaatagagccaccggcatcccggatcgcttcagcggaggcggatcgggcaccgacttcaccctcaccatttcaaggctggaaccggaggacttcgccgtgtactactgccagcagtatggttcgtccccaccctggacgttcggccaggggactaaggtcgagatcaagaccactaccccagcaccgaggccacccaccccggctcctaccatcgcctcccagcctctgtccctgcgtccggaggcatgtagacccgcagctggtggggccgtgcatacccggggtcttgacttcgcctgcgatatctacatttgggcccctctggctggtacttgcggggtcctgctgctttcactcgtgatcactctttactgtaagcgcggtcggaagaagctgctgtacatctttaagcaacccttcatgaggcctgtgcagactactcaagaggaggacggctgttcatgccggttcccagaggaggaggaaggcggctgcgaactgcgcgtgaaattcagccgcagcgcagatgctccagcctacaagcaggggcagaaccagctctacaacgaactcaatcttggtcggagagaggagtacgacgtgctggacaagcggagaggacgggacccagaaatgggcgggaagccgcgcagaaagaatccccaagagggcctgtacaacgagctccaaaaggataagatggcagaagcctatagcgagattggtatgaaaggggaacgcagaagaggcaaaggccacgacggactgtaccagggactcagcaccgccaccaaggacacctatgacgctcttcacatgcaggccctgccgcctcgg

SEQ ID NO: 1460 - protein, 239 aa, Artificial Sequence
  Description of Artificial Sequence: Synthetic polypeptide
QVQLVESGGGLVKPGGSLRLSCAASGFTFSDYYMSWIRQAPGKGLEWVSYISSSGSTIYYADSVKGRFTISRDNAKNSLYLQMNSLRAEDTAVYYCARESGDGMDVWGQGTTVTVSSASGGGGSGGRASGGGGSDIQMTQSPSSLSASVGDRVTITCRASQSISSYLNWYQQKPGKAPKLLIYAASSLQSGVPSRFSGSGSGTDFTLTISSLQPEDFATYYCQQSYTLAFGQGTKVDIK

SEQ ID NO: 1461 - DNA, 717 bp, Artificial Sequence
  Description of Artificial Sequence: Synthetic polynucleotide
caagtgcaactcgtggaatctggtggaggactcgtgaaacctggaggatcattgagactgtcatgcgcggcctcgggattcacgttctccgattactacatgagctggattcgccaggctccggggaagggactggaatgggtgtcctacatttcctcatccggctccaccatctactacgcggactccgtgaaggggagattcaccattagccgcgataacgccaagaacagcctgtaccttcagatgaactccctgcgggctgaagatactgccgtctactactgcgcaagggagagcggagatgggatggacgtctggggacagggtaccactgtgaccgtgtcgtcggcctccggcggagggggttcgggtggaagggccagcggcggcggaggcagcgacatccagatgacccagtccccctcatcgctgtccgcctccgtgggcgaccgcgtcaccatcacatgccgggcctcacagtcgatctcctcctacctcaattggtatcagcagaagcccggaaaggcccctaagcttctgatctacgcagcgtcctccctgcaatccggggtcccatctcggttctccggctcgggcagcggtaccgacttcactctgaccatctcgagcctgcagccggaggacttcgccacttactactgtcagcaaagctacaccctcgcgtttggccagggcaccaaagtggacatcaag

SEQ ID NO: 1462 - protein, 117 aa, Artificial Sequence
  Description of Artificial Sequence: Synthetic polypeptide
QVQLVESGGGLVKPGGSLRLSCAASGFTFSDYYMSWIRQAPGKGLEWVSYISSSGSTIYYADSVKGRFTISRDNAKNSLYLQMNSLRAEDTAVYYCARESGDGMDVWGQGTTVTVSS

SEQ ID NO: 1463 - protein, 105 aa, Artificial Sequence
  Description of Artificial Sequence: Synthetic polypeptide
DIQMTQSPSSLSASVGDRVTITCRASQSISSYLNWYQQKPGKAPKLLIYAASSLQSGVPSRFSGSGSGTDFTLTISSLQPEDFATYYCQQSYTLAFGQGTKVDIK

SEQ ID NO: 1464 - protein, 483 aa, Artificial Sequence
  Description of Artificial Sequence: Synthetic polypeptide
MALPVTALLLPLALLLHAARPQVQLVESGGGLVKPGGSLRLSCAASGFTFSDYYMSWIRQAPGKGLEWVSYISSSGSTIYYADSVKGRFTISRDNAKNSLYLQMNSLRAEDTAVYYCARESGDGMDVWGQGTTVTVSSASGGGGSGGRASGGGGSDIQMTQSPSSLSASVGDRVTITCRASQSISSYLNWYQQKPGKAPKLLIYAASSLQSGVPSRFSGSGSGTDFTLTISSLQPEDFATYYCQQSYTLAFGQGTKVDIKTTTPAPRPPTPAPTIASQPLSLRPEACRPAAGGAVHTRGLDFACDIYIWAPLAGTCGVLLLSLVITLYCKRGRKKLLYIFKQPFMRPVQTTQEEDGCSCRFPEEEEGGCELRVKFSRSADAPAYKQGQNQLYNELNLGRREEYDVLDKRRGRDPEMGGKPRRKNPQEGLYNELQKDKMAEAYSEIGMKGERRRGKGHDGLYQGLSTATKDTYDALHMQALPPR

SEQ ID NO: 1465 - DNA, 1449 bp, Artificial Sequence
  Description of Artificial Sequence: Synthetic polynucleotide
atggccctccctgtcaccgccctgctgcttccgctggctcttctgctccacgccgctcggccccaagtgcaactcgtggaatctggtggaggactcgtgaaacctggaggatcattgagactgtcatgcgcggcctcgggattcacgttctccgattactacatgagctggattcgccaggctccggggaagggactggaatgggtgtcctacatttcctcatccggctccaccatctactacgcggactccgtgaaggggagattcaccattagccgcgataacgccaagaacagcctgtaccttcagatgaactccctgcgggctgaagatactgccgtctactactgcgcaagggagagcggagatgggatggacgtctggggacagggtaccactgtgaccgtgtcgtcggcctccggcggagggggttcgggtggaagggccagcggcggcggaggcagcgacatccagatgacccagtccccctcatcgctgtccgcctccgtgggcgaccgcgtcaccatcacatgccgggcctcacagtcgatctcctcctacctcaattggtatcagcagaagcccggaaaggcccctaagcttctgatctacgcagcgtcctccctgcaatccggggtcccatctcggttctccggctcgggcagcggtaccgacttcactctgaccatctcgagcctgcagccggaggacttcgccacttactactgtcagcaaagctacaccctcgcgtttggccagggcaccaaagtggacatcaagaccactaccccagcaccgaggccacccaccccggctcctaccatcgcctcccagcctctgtccctgcgtccggaggcatgtagacccgcagctggtggggccgtgcatacccggggtcttgacttcgcctgcgatatctacatttgggcccctctggctggtacttgcggggtcctgctgctttcactcgtgatcactctttactgtaagcgcggtcggaagaagctgctgtacatctttaagcaacccttcatgaggcctgtgcagactactcaagaggaggacggctgttcatgccggttcccagaggaggaggaaggcggctgcgaactgcgcgtgaaattcagccgcagcgcagatgctccagcctacaagcaggggcagaaccagctctacaacgaactcaatcttggtcggagagaggagtacgacgtgctggacaagcggagaggacgggacccagaaatgggcgggaagccgcgcagaaagaatccccaagagggcctgtacaacgagctccaaaaggataagatggcagaagcctatagcgagattggtatgaaaggggaacgcagaagaggcaaaggccacgacggactgtaccagggactcagcaccgccaccaaggacacctatgacgctcttcacatgcaggccctgccgcctcgg

SEQ ID NO: 1466 - protein, 246 aa, Artificial Sequence
  Description of Artificial Sequence: Synthetic polypeptide
QVQLVQSGGGLVKPGGSLRLSCAASGFTFSDYYMSWIRQAPGKGLEWVSYISSSGNTIYYADSVKGRFTISRDNAKNSLYLQMNSLRAEDTAVYYCARSTMVREDYWGQGTLVTVSSASGGGGSGGRASGGGGSDIVLTQSPLSLPVTLGQPASISCKSSESLVHNSGKTYLNWFHQRPGQSPRRLIYEVSNRDSGVPDRFTGSGSGTDFTLKISRVEAEDVGVYYCMQGTHWPGTFGQGTKLEIK

SEQ ID NO: 1467 - DNA, 738 bp, Artificial Sequence
  Description of Artificial Sequence: Synthetic polynucleotide
caagtgcaactggtgcaaagcggaggaggattggtcaaacccggaggaagcctgagactgtcatgcgcggcctctggattcaccttctccgattactacatgtcatggatcagacaggccccggggaagggcctcgaatgggtgtcctacatctcgtcctccgggaacaccatctactacgccgacagcgtgaagggccgctttaccatttcccgcgacaacgcaaagaactcgctgtaccttcagatgaattccctgcgggctgaagataccgcggtgtactattgcgcccggtccactatggtccgggaggactactggggacagggcacactcgtgaccgtgtccagcgcgagcgggggtggaggcagcggtggacgcgcctccggcggcggcggttcagacatcgtgctgactcagtcgcccctgtcgctgccggtcaccctgggccaaccggcctcaattagctgcaagtcctcggagagcctggtgcacaactcaggaaagacttacctgaactggttccatcagcggcctggacagtccccacggaggctcatctatgaagtgtccaacagggattcgggggtgcccgaccgcttcactggctccgggtccggcaccgacttcaccttgaaaatctccagagtggaagccgaggacgtgggcgtgtactactgtatgcagggtacccactggcctggaacctttggacaaggaactaagctcgagattaag

SEQ ID NO: 1468 - protein, 117 aa, Artificial Sequence
  Description of Artificial Sequence: Synthetic polypeptide
QVQLVQSGGGLVKPGGSLRLSCAASGFTFSDYYMSWIRQAPGKGLEWVSYISSSGNTIYYADSVKGRFTISRDNAKNSLYLQMNSLRAEDTAVYYCARSTMVREDYWGQGTLVTVSS

SEQ ID NO: 1469 - protein, 112 aa, Artificial Sequence
  Description of Artificial Sequence: Synthetic polypeptide
DIVLTQSPLSLPVTLGQPASISCKSSESLVHNSGKTYLNWFHQRPGQSPRRLIYEVSNRDSGVPDRFTGSGSGTDFTLKISRVEAEDVGVYYCMQGTHWPGTFGQGTKLEIK

SEQ ID NO: 1470 - protein, 490 aa, Artificial Sequence
  Description of Artificial Sequence: Synthetic polypeptide
MALPVTALLLPLALLLHAARPQVQLVQSGGGLVKPGGSLRLSCAASGFTFSDYYMSWIRQAPGKGLEWVSYISSSGNTIYYADSVKGRFTISRDNAKNSLYLQMNSLRAEDTAVYYCARSTMVREDYWGQGTLVTVSSASGGGGSGGRASGGGGSDIVLTQSPLSLPVTLGQPASISCKSSESLVHNSGKTYLNWFHQRPGQSPRRLIYEVSNRDSGVPDRFTGSGSGTDFTLKISRVEAEDVGVYYCMQGTHWPGTFGQGTKLEIKTTTPAPRPPTPAPTIASQPLSLRPEACRPAAGGAVHTRGLDFACDIYIWAPLAGTCGVLLLSLVITLYCKRGRKKLLYIFKQPFMRPVQTTQEEDGCSCRFPEEEEGGCELRVKFSRSADAPAYKQGQNQLYNELNLGRREEYDVLDKRRGRDPEMGGKPRRKNPQEGLYNELQKDKMAEAYSEIGMKGERRRGKGHDGLYQGLSTATKDTYDALHMQALPPR

SEQ ID NO: 1471 - DNA, 1470 bp, Artificial Sequence
  Description of Artificial Sequence: Synthetic polynucleotide
atggccctccctgtcaccgccctgctgcttccgctggctcttctgctccacgccgctcggccccaagtgcaactggtgcaaagcggaggaggattggtcaaacccggaggaagcctgagactgtcatgcgcggcctctggattcaccttctccgattactacatgtcatggatcagacaggccccggggaagggcctcgaatgggtgtcctacatctcgtcctccgggaacaccatctactacgccgacagcgtgaagggccgctttaccatttcccgcgacaacgcaaagaactcgctgtaccttcagatgaattccctgcgggctgaagataccgcggtgtactattgcgcccggtccactatggtccgggaggactactggggacagggcacactcgtgaccgtgtccagcgcgagcgggggtggaggcagcggtggacgcgcctccggcggcggcggttcagacatcgtgctgactcagtcgcccctgtcgctgccggtcaccctgggccaaccggcctcaattagctgcaagtcctcggagagcctggtgcacaactcaggaaagacttacctgaactggttccatcagcggcctggacagtccccacggaggctcatctatgaagtgtccaacagggattcgggggtgcccgaccgcttcactggctccgggtccggcaccgacttcaccttgaaaatctccagagtggaagccgaggacgtgggcgtgtactactgtatgcagggtacccactggcctggaacctttggacaaggaactaagctcgagattaagaccactaccccagcaccgaggccacccaccccggctcctaccatcgcctcccagcctctgtccctgcgtccggaggcatgtagacccgcagctggtggggccgtgcatacccggggtcttgacttcgcctgcgatatctacatttgggcccctctggctggtacttgcggggtcctgctgctttcactcgtgatcactctttactgtaagcgcggtcggaagaagctgctgtacatctttaagcaacccttcatgaggcctgtgcagactactcaagaggaggacggctgttcatgccggttcccagaggaggaggaaggcggctgcgaactgcgcgtgaaattcagccgcagcgcagatgctccagcctacaagcaggggcagaaccagctctacaacgaactcaatcttggtcggagagaggagtacgacgtgctggacaagcggagaggacgggacccagaaatgggcgggaagccgcgcagaaagaatccccaagagggcctgtacaacgagctccaaaaggataagatggcagaagcctatagcgagattggtatgaaaggggaacgcagaagaggcaaaggccacgacggactgtaccagggactcagcaccgccaccaaggacacctatgacgctcttcacatgcaggccctgccgcctcgg

SEQ ID NO: 1472 - protein, 239 aa, Artificial Sequence
  Description of Artificial Sequence: Synthetic polypeptide
QVQLVESGGGLVQPGGSLRLSCAVSGFALSNHGMSWVRRAPGKGLEWVSGIVYSGSTYYAASVKGRFTISRDNSRNTLYLQMNSLRPEDTAIYYCSAHGGESDVWGQGTTVTVSSASGGGGSGGRASGGGGSDIRLTQSPSPLSASVGDRVTITCQASEDINKFLNWYHQTPGKAPKLLIYDASTLQTGVPSRFSGSGSGTDFTLTINSLQPEDIGTYYCQQYESLPLTFGGGTKVEIK

SEQ ID NO: 1473 - DNA, 717 bp, Artificial Sequence
  Description of Artificial Sequence: Synthetic polynucleotide
caagtgcaactcgtggaatctggtggaggactcgtgcaacccggtggaagccttaggctgtcgtgcgccgtcagcgggtttgctctgagcaaccatggaatgtcctgggtccgccgggcaccgggaaaagggctggaatgggtgtccggcatcgtgtacagcgggtcaacctattacgccgcgtccgtgaagggcagattcactatctcaagagacaacagccggaacaccctgtacttgcaaatgaattccctgcgccccgaggacaccgccatctactactgctccgcccacggaggagagtcggacgtgtggggccagggaacgactgtgactgtgtccagcgcatcaggagggggtggttcgggcggccgggcctcggggggaggaggttccgacattcggctgacccagtccccgtccccactgtcggcctccgtcggcgaccgcgtgaccatcacttgtcaggcgtccgaggacattaacaagttcctgaactggtaccaccagacccctggaaaggcccccaagctgctgatctacgatgcctcgacccttcaaactggagtgcctagccggttctccgggtccggctccggcactgatttcactctgaccatcaactcattgcagccggaagatatcgggacctactattgccagcagtacgaatccctcccgctcacattcggcgggggaaccaaggtcgagattaag

SEQ ID NO: 1474 - protein, 115 aa, Artificial Sequence
  Description of Artificial Sequence: Synthetic polypeptide
QVQLVESGGGLVQPGGSLRLSCAVSGFALSNHGMSWVRRAPGKGLEWVSGIVYSGSTYYAASVKGRFTISRDNSRNTLYLQMNSLRPEDTAIYYCSAHGGESDVWGQGTTVTVSS

SEQ ID NO: 1475 - protein, 107 aa, Artificial Sequence
  Description of Artificial Sequence: Synthetic polypeptide
DIRLTQSPSPLSASVGDRVTITCQASEDINKFLNWYHQTPGKAPKLLIYDASTLQTGVPSRFSGSGSGTDFTLTINSLQPEDIGTYYCQQYESLPLTFGGGTKVEIK

SEQ ID NO: 1476 - protein, 483 aa, Artificial Sequence
  Description of Artificial Sequence: Synthetic polypeptide
MALPVTALLLPLALLLHAARPQVQLVESGGGLVQPGGSLRLSCAVSGFALSNHGMSWVRRAPGKGLEWVSGIVYSGSTYYAASVKGRFTISRDNSRNTLYLQMNSLRPEDTAIYYCSAHGGESDVWGQGTTVTVSSASGGGGSGGRASGGGGSDIRLTQSPSPLSASVGDRVTITCQASEDINKFLNWYHQTPGKAPKLLIYDASTLQTGVPSRFSGSGSGTDFTLTINSLQPEDIGTYYCQQYESLPLTFGGGTKVEIKTTTPAPRPPTPAPTIASQPLSLRPEACRPAAGGAVHTRGLDFACDIYIWAPLAGTCGVLLLSLVITLYCKRGRKKLLYIFKQPFMRPVQTTQEEDGCSCRFPEEEEGGCELRVKFSRSADAPAYKQGQNQLYNELNLGRREEYDVLDKRRGRDPEMGGKPRRKNPQEGLYNELQKDKMAEAYSEIGMKGERRRGKGHDGLYQGLSTATKDTYDALHMQALPPR

SEQ ID NO: 1477 - DNA, 1449 bp, Artificial Sequence
  Description of Artificial Sequence: Synthetic polynucleotide
atggccctccctgtcaccgccctgctgcttccgctggctcttctgctccacgccgctcggccccaagtgcaactcgtggaatctggtggaggactcgtgcaacccggtggaagccttaggctgtcgtgcgccgtcagcgggtttgctctgagcaaccatggaatgtcctgggtccgccgggcaccgggaaaagggctggaatgggtgtccggcatcgtgtacagcgggtcaacctattacgccgcgtccgtgaagggcagattcactatctcaagagacaacagccggaacaccctgtacttgcaaatgaattccctgcgccccgaggacaccgccatctactactgctccgcccacggaggagagtcggacgtgtggggccagggaacgactgtgactgtgtccagcgcatcaggagggggtggttcgggcggccgggcctcggggggaggaggttccgacattcggctgacccagtccccgtccccactgtcggcctccgtcggcgaccgcgtgaccatcacttgtcaggcgtccgaggacattaacaagttcctgaactggtaccaccagacccctggaaaggcccccaagctgctgatctacgatgcctcgacccttcaaactggagtgcctagccggttctccgggtccggctccggcactgatttcactctgaccatcaactcattgcagccggaagatatcgggacctactattgccagcagtacgaatccctcccgctcacattcggcgggggaaccaaggtcgagattaagaccactaccccagcaccgaggccacccaccccggctcctaccatcgcctcccagcctctgtccctgcgtccggaggcatgtagacccgcagctggtggggccgtgcatacccggggtcttgacttcgcctgcgatatctacatttgggcccctctggctggtacttgcggggtcctgctgctttcactcgtgatcactctttactgtaagcgcggtcggaagaagctgctgtacatctttaagcaacccttcatgaggcctgtgcagactactcaagaggaggacggctgttcatgccggttcccagaggaggaggaaggcggctgcgaactgcgcgtgaaattcagccgcagcgcagatgctccagcctacaagcaggggcagaaccagctctacaacgaactcaatcttggtcggagagaggagtacgacgtgctggacaagcggagaggacgggacccagaaatgggcgggaagccgcgcagaaagaatccccaagagggcctgtacaacgagctccaaaaggataagatggcagaagcctatagcgagattggtatgaaaggggaacgcagaagaggcaaaggccacgacggactgtaccagggactcagcaccgccaccaaggacacctatgacgctcttcacatgcaggccctgccgcctcgg

SEQ ID NO: 1478 - protein, 240 aa, Artificial Sequence
  Description of Artificial Sequence: Synthetic polypeptide
EVQLVETGGGLVQPGGSLRLSCAVSGFALSNHGMSWVRRAPGKGLEWVSGIVYSGSTYYAASVKGRFTISRDNSRNTLYLQMNSLRPEDTAIYYCSAHGGESDVWGQGTTVTVSSASGGGGSGGRASGGGGSETTLTQSPATLSVSPGERATLSCRASQSVGSNLAWYQQKPGQGPRLLIYGASTRATGIPARFSGSGSGTEFTLTISSLQPEDFAVYYCQQYNDWLPVTFGQGTKVEIK

SEQ ID NO: 1479 - skipped

SEQ ID NO: 1480 - DNA, 720 bp, Artificial Sequence
  Description of Artificial Sequence: Synthetic polynucleotide
gaagtgcaattggtggaaactggaggaggacttgtgcaacctggaggatcattgcggctctcatgcgctgtctccggcttcgccctgtcaaatcacgggatgtcgtgggtcagacgggccccgggaaagggtctggaatgggtgtcggggattgtgtacagcggctccacctactacgccgcttcggtcaagggccgcttcactatttcacgggacaacagccgcaacaccctctatctgcaaatgaactctctccgcccggaggataccgccatctactactgctccgcacacggcggcgaatccgacgtgtggggacagggaaccactgtcaccgtgtcgtccgcatccggtggcggaggatcgggtggccgggcctccgggggcggcggcagcgagactaccctgacccagtcccctgccactctgtccgtgagcccgggagagagagccacccttagctgccgggccagccagagcgtgggctccaacctggcctggtaccagcagaagccaggacagggtcccaggctgctgatctacggagcctccactcgcgcgaccggcatccccgcgaggttctccgggtcgggttccgggaccgagttcaccctgaccatctcctccctccaaccggaggacttcgcggtgtactactgtcagcagtacaacgattggctgcccgtgacatttggacaggggacgaaggtggaaatcaaa

SEQ ID NO: 1481 - protein, 115 aa, Artificial Sequence; identical to SEQ ID NO: 1450
  Description of Artificial Sequence: Synthetic polypeptide

SEQ ID NO: 1482 - protein, 108 aa, Artificial Sequence
  Description of Artificial Sequence: Synthetic polypeptide
ETTLTQSPATLSVSPGERATLSCRASQSVGSNLAWYQQKPGQGPRLLIYGASTRATGIPARFSGSGSGTEFTLTISSLQPEDFAVYYCQQYNDWLPVTFGQGTKVEIK

SEQ ID NO: 1483 - protein, 484 aa, Artificial Sequence
  Description of Artificial Sequence: Synthetic polypeptide
MALPVTALLLPLALLLHAARPEVQLVETGGGLVQPGGSLRLSCAVSGFALSNHGMSWVRRAPGKGLEWVSGIVYSGSTYYAASVKGRFTISRDNSRNTLYLQMNSLRPEDTAIYYCSAHGGESDVWGQGTTVTVSSASGGGGSGGRASGGGGSETTLTQSPATLSVSPGERATLSCRASQSVGSNLAWYQQKPGQGPRLLIYGASTRATGIPARFSGSGSGTEFTLTISSLQPEDFAVYYCQQYNDWLPVTFGQGTKVEIKTTTPAPRPPTPAPTIASQPLSLRPEACRPAAGGAVHTRGLDFACDIYIWAPLAGTCGVLLLSLVITLYCKRGRKKLLYIFKQPFMRPVQTTQEEDGCSCRFPEEEEGGCELRVKFSRSADAPAYKQGQNQLYNELNLGRREEYDVLDKRRGRDPEMGGKPRRKNPQEGLYNELQKDKMAEAYSEIGMKGERRRGKGHDGLYQGLSTATKDTYDALHMQALPPR

SEQ ID NO: 1484 - DNA, 1452 bp, Artificial Sequence
  Description of Artificial Sequence: Synthetic polynucleotide
atggccctccctgtcaccgccctgctgcttccgctggctcttctgctccacgccgctcggcccgaagtgcaattggtggaaactggaggaggacttgtgcaacctggaggatcattgcggctctcatgcgctgtctccggcttcgccctgtcaaatcacgggatgtcgtgggtcagacgggccccgggaaagggtctggaatgggtgtcggggattgtgtacagcggctccacctactacgccgcttcggtcaagggccgcttcactatttcacgggacaacagccgcaacaccctctatctgcaaatgaactctctccgcccggaggataccgccatctactactgctccgcacacggcggcgaatccgacgtgtggggacagggaaccactgtcaccgtgtcgtccgcatccggtggcggaggatcgggtggccgggcctccgggggcggcggcagcgagactaccctgacccagtcccctgccactctgtccgtgagcccgggagagagagccacccttagctgccgggccagccagagcgtgggctccaacctggcctggtaccagcagaagccaggacagggtcccaggctgctgatctacggagcctccactcgcgcgaccggcatccccgcgaggttctccgggtcgggttccgggaccgagttcaccctgaccatctcctccctccaaccggaggacttcgcggtgtactactgtcagcagtacaacgattggctgcccgtgacatttggacaggggacgaaggtggaaatcaaaaccactaccccagcaccgaggccacccaccccggctcctaccatcgcctcccagcctctgtccctgcgtccggaggcatgtagacccgcagctggtggggccgtgcatacccggggtcttgacttcgcctgcgatatctacatttgggcccctctggctggtacttgcggggtcctgctgctttcactcgtgatcactctttactgtaagcgcggtcggaagaagctgctgtacatctttaagcaacccttcatgaggcctgtgcagactactcaagaggaggacggctgttcatgccggttcccagaggaggaggaaggcggctgcgaactgcgcgtgaaattcagccgcagcgcagatgctccagcctacaagcaggggcagaaccagctctacaacgaactcaatcttggtcggagagaggagtacgacgtgctggacaagcggagaggacgggacccagaaatgggcgggaagccgcgcagaaagaatccccaagagggcctgtacaacgagctccaaaaggataagatggcagaagcctatagcgagattggtatgaaaggggaacgcagaagaggcaaaggccacgacggactgtaccagggactcagcaccgccaccaaggacacctatgacgctcttcacatgcaggccctgccgcctcgg

SEQ ID NO: 1485 - protein, 241 aa, Artificial Sequence
  Description of Artificial Sequence: Synthetic polypeptide
EVQLVESGGGLVQPGGSLRLSCAVSGFALSNHGMSWVRRAPGKGLEWVSGIVYSGSTYYAASVKGRFTISRDNSRNTLYLQMNSLRPEDTAIYYCSAHGGESDVWGQGTTVTVSSASGGGGSGGRASGGGGSEIVLTQSPGTLSLSPGERATLSCRASQSIGSSSLAWYQQKPGQAPRLLMYGASSRASGIPDRFSGSGSGTDFTLTISRLEPEDFAVYYCQQYAGSPPFTFGQGTKVEIK

SEQ ID NO: 1486 - DNA, 723 bp, Artificial Sequence
  Description of Artificial Sequence: Synthetic polynucleotide
gaagtgcaattggtggaatctggtggaggacttgtgcaacctggaggatcactgagactgtcatgcgcggtgtccggttttgccctgagcaatcatgggatgtcgtgggtccggcgcgcccccggaaagggtctggaatgggtgtcgggtatcgtctactccgggagcacttactacgccgcgagcgtgaagggccgcttcaccatttcccgcgataactcccgcaacaccctgtacttgcaaatgaactcgctccggcctgaggacactgccatctactactgctccgcacacggaggagaatccgacgtgtggggccagggaactaccgtgaccgtcagcagcgcctccggcggcgggggctcaggcggacgggctagcggcggcggtggctccgagatcgtgctgacccagtcgcctggcactctctcgctgagccccggggaaagggcaaccctgtcctgtcgggccagccagtccattggatcatcctccctcgcctggtatcagcagaaaccgggacaggctccgcggctgcttatgtatggggccagctcaagagcctccggcattcccgaccggttctccgggtccggttccggcaccgatttcaccctgactatctcgaggctggagccagaggacttcgccgtgtactactgccagcagtacgcggggtccccgccgttcacgttcggacagggaaccaaggtcgagatcaag

SEQ ID NO: 1487 - protein, 115 aa, Artificial Sequence; identical to SEQ ID NO: 1402
  Description of Artificial Sequence: Synthetic polypeptide

SEQ ID NO: 1488 - protein, 109 aa, Artificial Sequence
  Description of Artificial Sequence: Synthetic polypeptide
EIVLTQSPGTLSLSPGERATLSCRASQSIGSSSLAWYQQKPGQAPRLLMYGASSRASGIPDRFSGSGSGTDFTLTISRLEPEDFAVYYCQQYAGSPPFTFGQGTKVEIK

SEQ ID NO: 1489 - protein, 485 aa, Artificial Sequence
  Description of Artificial Sequence: Synthetic polypeptide
MALPVTALLLPLALLLHAARPEVQLVESGGGLVQPGGSLRLSCAVSGFALSNHGMSWVRRAPGKGLEWVSGIVYSGSTYYAASVKGRFTISRDNSRNTLYLQMNSLRPEDTAIYYCSAHGGESDVWGQGTTVTVSSASGGGGSGGRASGGGGSEIVLTQSPGTLSLSPGERATLSCRASQSIGSSSLAWYQQKPGQAPRLLMYGASSRASGIPDRFSGSGSGTDFTLTISRLEPEDFAVYYCQQYAGSPPFTFGQGTKVEIKTTTPAPRPPTPAPTIASQPLSLRPEACRPAAGGAVHTRGLDFACDIYIWAPLAGTCGVLLLSLVITLYCKRGRKKLLYIFKQPFMRPVQTTQEEDGCSCRFPEEEEGGCELRVKFSRSADAPAYKQGQNQLYNELNLGRREEYDVLDKRRGRDPEMGGKPRRKNPQEGLYNELQKDKMAEAYSEIGMKGERRRGKGHDGLYQGLSTATKDTYDALHMQALPPR

SEQ ID NO: 1490 - DNA, 1455 bp, Artificial Sequence
  Description of Artificial Sequence: Synthetic polynucleotide
atggccctccctgtcaccgccctgctgcttccgctggctcttctgctccacgccgctcggcccgaagtgcaattggtggaatctggtggaggacttgtgcaacctggaggatcactgagactgtcatgcgcggtgtccggttttgccctgagcaatcatgggatgtcgtgggtccggcgcgcccccggaaagggtctggaatgggtgtcgggtatcgtctactccgggagcacttactacgccgcgagcgtgaagggccgcttcaccatttcccgcgataactcccgcaacaccctgtacttgcaaatgaactcgctccggcctgaggacactgccatctactactgctccgcacacggaggagaatccgacgtgtggggccagggaactaccgtgaccgtcagcagcgcctccggcggcgggggctcaggcggacgggctagcggcggcggtggctccgagatcgtgctgacccagtcgcctggcactctctcgctgagccccggggaaagggcaaccctgtcctgtcgggccagccagtccattggatcatcctccctcgcctggtatcagcagaaaccgggacaggctccgcggctgcttatgtatggggccagctcaagagcctccggcattcccgaccggttctccgggtccggttccggcaccgatttcaccctgactatctcgaggctggagccagaggacttcgccgtgtactactgccagcagtacgcggggtccccgccgttcacgttcggacagggaaccaaggtcgagatcaagaccactaccccagcaccgaggccacccaccccggctcctaccatcgcctcccagcctctgtccctgcgtccggaggcatgtagacccgcagctggtggggccgtgcatacccggggtcttgacttcgcctgcgatatctacatttgggcccctctggctggtacttgcggggtcctgctgctttcactcgtgatcactctttactgtaagcgcggtcggaagaagctgctgtacatctttaagcaacccttcatgaggcctgtgcagactactcaagaggaggacggctgttcatgccggttcccagaggaggaggaaggcggctgcgaactgcgcgtgaaattcagccgcagcgcagatgctccagcctacaagcaggggcagaaccagctctacaacgaactcaatcttggtcggagagaggagtacgacgtgctggacaagcggagaggacgggacccagaaatgggcgggaagccgcgcagaaagaatccccaagagggcctgtacaacgagctccaaaaggataagatggcagaagcctatagcgagattggtatgaaaggggaacgcagaagaggcaaaggccacgacggactgtaccagggactcagcaccgccaccaaggacacctatgacgctcttcacatgcaggccctgccgcctcgg

SEQ ID NO: 1491 - protein, 243 aa, Artificial Sequence
  Description of Artificial Sequence: Synthetic polypeptide
QVQLQESGPGLVKPSETLSLTCTVSGGSISSSYYYWGWIRQPPGKGLEWIGSIYYSGSAYYNPSLKSRVTISVDTSKNQFSLRLSSVTAADTAVYYCARHWQEWPDAFDIWGQGTMVTVSSGGGGSGGGGSGGGGSETTLTQSPAFMSATPGDKVIISCKASQDIDDAMNWYQQKPGEAPLFIIQSATSPVPGIPPRFSGSGFGTDFSLTINNIESEDAAYYFCLQHDNFPLTFGQGTKLEIK

SEQ ID NO: 1492 - DNA, 729 bp, Artificial Sequence
  Description of Artificial Sequence: Synthetic polynucleotide
caagtgcagcttcaggaaagcggaccgggcctggtcaagccatccgaaactctctccctgacttgcactgtgtctggcggttccatctcatcgtcgtactactactggggctggattaggcagccgcccggaaagggactggagtggatcggaagcatctactattccggctcggcgtactacaaccctagcctcaagtcgagagtgaccatctccgtggatacctccaagaaccagttttccctgcgcctgagctccgtgaccgccgctgacaccgccgtgtactactgtgctcggcattggcaggaatggcccgatgccttcgacatttggggccagggcactatggtcactgtgtcatccgggggtggaggcagcgggggaggagggtccggggggggaggttcagagacaaccttgacccagtcacccgcattcatgtccgccactccgggagacaaggtcatcatctcgtgcaaagcgtcccaggatatcgacgatgccatgaattggtaccagcagaagcctggcgaagcgccgctgttcattatccaatccgcaacctcgcccgtgcctggaatcccaccgcggttcagcggcagcggtttcggaaccgacttttccctgaccattaacaacattgagtccgaggacgccgcctactacttctgcctgcaacacgacaacttccctctcacgttcggccagggaaccaagctggaaatcaag

SEQ ID NO: 1493 - protein, 121 aa, Artificial Sequence
  Description of Artificial Sequence: Synthetic polypeptide
QVQLQESGPGLVKPSETLSLTCTVSGGSISSSYYYWGWIRQPPGKGLEWIGSIYYSGSAYYNPSLKSRVTISVDTSKNQFSLRLSSVTAADTAVYYCARHWQEWPDAFDIWGQGTMVTVSS

SEQ ID NO: 1494 - protein, 107 aa, Artificial Sequence
  Description of Artificial Sequence: Synthetic polypeptide
ETTLTQSPAFMSATPGDKVIISCKASQDIDDAMNWYQQKPGEAPLFIIQSATSPVPGIPPRFSGSGFGTDFSLTINNIESEDAAYYFCLQHDNFPLTFGQGTKLEIK

SEQ ID NO: 1495 - protein, 487 aa, Artificial Sequence
  Description of Artificial Sequence: Synthetic polypeptide
MALPVTALLLPLALLLHAARPQVQLQESGPGLVKPSETLSLTCTVSGGSISSSYYYWGWIRQPPGKGLEWIGSIYYSGSAYYNPSLKSRVTISVDTSKNQFSLRLSSVTAADTAVYYCARHWQEWPDAFDIWGQGTMVTVSSGGGGSGGGGSGGGGSETTLTQSPAFMSATPGDKVIISCKASQDIDDAMNWYQQKPGEAPLFIIQSATSPVPGIPPRFSGSGFGTDFSLTINNIESEDAAYYFCLQHDNFPLTFGQGTKLEIKTTTPAPRPPTPAPTIASQPLSLRPEACRPAAGGAVHTRGLDFACDIYIWAPLAGTCGVLLLSLVITLYCKRGRKKLLYIFKQPFMRPVQTTQEEDGCSCRFPEEEEGGCELRVKFSRSADAPAYKQGQNQLYNELNLGRREEYDVLDKRRGRDPEMGGKPRRKNPQEGLYNELQKDKMAEAYSEIGMKGERRRGKGHDGLYQGLSTATKDTYDALHMQALPPR

SEQ ID NO: 1496 - DNA, 1461 bp, Artificial Sequence
  Description of Artificial Sequence: Synthetic polynucleotide
atggccctccctgtcaccgccctgctgcttccgctggctcttctgctccacgccgctcggccccaagtgcagcttcaggaaagcggaccgggcctggtcaagccatccgaaactctctccctgacttgcactgtgtctggcggttccatctcatcgtcgtactactactggggctggattaggcagccgcccggaaagggactggagtggatcggaagcatctactattccggctcggcgtactacaaccctagcctcaagtcgagagtgaccatctccgtggatacctccaagaaccagttttccctgcgcctgagctccgtgaccgccgctgacaccgccgtgtactactgtgctcggcattggcaggaatggcccgatgccttcgacatttggggccagggcactatggtcactgtgtcatccgggggtggaggcagcgggggaggagggtccggggggggaggttcagagacaaccttgacccagtcacccgcattcatgtccgccactccgggagacaaggtcatcatctcgtgcaaagcgtcccaggatatcgacgatgccatgaattggtaccagcagaagcctggcgaagcgccgctgttcattatccaatccgcaacctcgcccgtgcctggaatcccaccgcggttcagcggcagcggtttcggaaccgacttttccctgaccattaacaacattgagtccgaggacgccgcctactacttctgcctgcaacacgacaacttccctctcacgttcggccagggaaccaagctggaaatcaagaccactaccccagcaccgaggccacccaccccggctcctaccatcgcctcccagcctctgtccctgcgtccggaggcatgtagacccgcagctggtggggccgtgcatacccggggtcttgacttcgcctgcgatatctacatttgggcccctctggctggtacttgcggggtcctgctgctttcactcgtgatcactctttactgtaagcgcggtcggaagaagctgctgtacatctttaagcaacccttcatgaggcctgtgcagactactcaagaggaggacggctgttcatgccggttcccagaggaggaggaaggcggctgcgaactgcgcgtgaaattcagccgcagcgcagatgctccagcctacaagcaggggcagaaccagctctacaacgaactcaatcttggtcggagagaggagtacgacgtgctggacaagcggagaggacgggacccagaaatgggcgggaagccgcgcagaaagaatccccaagagggcctgtacaacgagctccaaaaggataagatggcagaagcctatagcgagattggtatgaaaggggaacgcagaagaggcaaaggccacgacggactgtaccagggactcagcaccgccaccaaggacacctatgacgctcttcacatgcaggccctgccgcctcgg

SEQ ID NO: 1497 - protein, 244 aa, Artificial Sequence
  Description of Artificial Sequence: Synthetic polypeptide
VNLRESGPALVKPTQTLTLTCTFSGFSLRTSGMCVSWIRQPPGKALEWLARIDWDEDKFYSTSLKTRLTISKDTSDNQVVLRMTNMDPADTATYYCARSGAGGTSATAFDIWGPGTMVTVSSGGGGSGGGGSGGGGSDIQMTQSPSSLSASVGDRVTITCRASQDIYNNLAWFQLKPGSAPRSLMYAANKSQSGVPSRFSGSASGTDFTLTISSLQPEDFATYYCQHYYRFPYSFGQGTKLEIK

SEQ ID NO: 1498 - DNA, 735 bp, Artificial Sequence
  Description of Artificial Sequence: Synthetic polynucleotide
caagtcaatctgcgcgaatccggccccgccttggtcaagcctacccagaccctcactctgacctgtactttctccggcttctccctgcggacttccgggatgtgcgtgtcctggatcagacagcctccgggaaaggccctggagtggctcgctcgcattgactgggatgaggacaagttctactccacctcactcaagaccaggctgaccatcagcaaagatacctctgacaaccaagtggtgctccgcatgaccaacatggacccagccgacactgccacttactactgcgcgaggagcggagcgggcggaacctccgccaccgccttcgatatttggggcccgggtaccatggtcaccgtgtcaagcggaggaggggggtccgggggcggcggttccgggggaggcggatcggacattcagatgactcagtcaccatcgtccctgagcgctagcgtgggcgacagagtgacaatcacttgccgggcatcccaggacatctataacaaccttgcgtggttccagctgaagcctggttccgcaccgcggtcacttatgtacgccgccaacaagagccagtcgggagtgccgtcccggttttccggttcggcctcgggaactgacttcaccctgacgatctccagcctgcaacccgaggatttcgccacctactactgccagcactactaccgctttccctactcgttcggacagggaaccaagctggaaatcaag

SEQ ID NO: 1499 - protein, 123 aa, Artificial Sequence
  Description of Artificial Sequence: Synthetic polypeptide
QVNLRESGPALVKPTQTLTLTCTFSGFSLRTSGMCVSWIRQPPGKALEWLARIDWDEDKFYSTSLKTRLTISKDTSDNQVVLRMTNMDPADTATYYCARSGAGGTSATAFDIWGPGTMVTVSS

SEQ ID NO: 1500 - protein, 107 aa, Artificial Sequence
  Description of Artificial Sequence: Synthetic polypeptide
DIQMTQSPSSLSASVGDRVTITCRASQDIYNNLAWFQLKPGSAPRSLMYAANKSQSGVPSRFSGSASGTDFTLTISSLQPEDFATYYCQHYYRFPYSFGQGTKLEIK

SEQ ID NO: 1501 - protein, 489 aa, Artificial Sequence
  Description of Artificial Sequence: Synthetic polypeptide
MALPVTALLLPLALLLHAARPQVNLRESGPALVKPTQTLTLTCTFSGFSLRTSGMCVSWIRQPPGKALEWLARIDWDEDKFYSTSLKTRLTISKDTSDNQVVLRMTNMDPADTATYYCARSGAGGTSATAFDIWGPGTMVTVSSGGGGSGGGGSGGGGSDIQMTQSPSSLSASVGDRVTITCRASQDIYNNLAWFQLKPGSAPRSLMYAANKSQSGVPSRFSGSASGTDFTLTISSLQPEDFATYYCQHYYRFPYSFGQGTKLEIKTTTPAPRPPTPAPTIASQPLSLRPEACRPAAGGAVHTRGLDFACDIYIWAPLAGTCGVLLLSLVITLYCKRGRKKLLYIFKQPFMRPVQTTQEEDGCSCRFPEEEEGGCELRVKFSRSADAPAYKQGQNQLYNELNLGRREEYDVLDKRRGRDPEMGGKPRRKNPQEGLYNELQKDKMAEAYSEIGMKGERRRGKGHDGLYQGLSTATKDTYDALHMQALPPR

SEQ ID NO: 1502 - DNA, 1467 bp, Artificial Sequence
  Description of Artificial Sequence: Synthetic polynucleotide
atggccctccctgtcaccgccctgctgcttccgctggctcttctgctccacgccgctcggccccaagtcaatctgcgcgaatccggccccgccttggtcaagcctacccagaccctcactctgacctgtactttctccggcttctccctgcggacttccgggatgtgcgtgtcctggatcagacagcctccgggaaaggccctggagtggctcgctcgcattgactgggatgaggacaagttctactccacctcactcaagaccaggctgaccatcagcaaagatacctctgacaaccaagtggtgctccgcatgaccaacatggacccagccgacactgccacttactactgcgcgaggagcggagcgggcggaacctccgccaccgccttcgatatttggggcccgggtaccatggtcaccgtgtcaagcggaggaggggggtccgggggcggcggttccgggggaggcggatcggacattcagatgactcagtcaccatcgtccctgagcgctagcgtgggcgacagagtgacaatcacttgccgggcatcccaggacatctataacaaccttgcgtggttccagctgaagcctggttccgcaccgcggtcacttatgtacgccgccaacaagagccagtcgggagtgccgtcccggttttccggttcggcctcgggaactgacttcaccctgacgatctccagcctgcaacccgaggatttcgccacctactactgccagcactactaccgctttccctactcgttcggacagggaaccaagctggaaatcaagaccactaccccagcaccgaggccacccaccccggctcctaccatcgcctcccagcctctgtccctgcgtccggaggcatgtagacccgcagctggtggggccgtgcatacccggggtcttgacttcgcctgcgatatctacatttgggcccctctggctggtacttgcggggtcctgctgctttcactcgtgatcactctttactgtaagcgcggtcggaagaagctgctgtacatctttaagcaacccttcatgaggcctgtgcagactactcaagaggaggacggctgttcatgccggttcccagaggaggaggaaggcggctgcgaactgcgcgtgaaattcagccgcagcgcagatgctccagcctacaagcaggggcagaaccagctctacaacgaactcaatcttggtcggagagaggagtacgacgtgctggacaagcggagaggacgggacccagaaatgggcgggaagccgcgcagaaagaatccccaagagggcctgtacaacgagctccaaaaggataagatggcagaagcctatagcgagattggtatgaaaggggaacgcagaagaggcaaaggccacgacggactgtaccagggactcagcaccgccaccaaggacacctatgacgctcttcacatgcaggccctgccgcctcgg

SEQ ID NO: 1503 - protein, 246 aa, Artificial Sequence
  Description of Artificial Sequence: Synthetic polypeptide
EVQLVESGGGLVKPGGSLRLSCAASGFTFSSYSMNWVRQAPGKGLEWVSSISSSSSYIYYADSVKGRFTISRDNAKNSLYLQMNSLRAEDTAVYYCAKTIAAVYAFDIWGQGTTVTVSSGGGGSGGGGSGGGGSEIVLTQSPLSLPVTPEEPASISCRSSQSLLHSNGYNYLDWYLQKPGQSPQLLIYLGSNRASGVPDRFSGSGSGTDFTLKISRVEAEDVGVYYCMQALQTPYTFGQGTKLEIK

SEQ ID NO: 1504 - DNA, 738 bp, Artificial Sequence
  Description of Artificial Sequence: Synthetic polynucleotide
gaagtgcagcttgtcgaatccggggggggactggtcaagccgggcggatcactgagactgtcctgcgccgcgagcggcttcacgttctcctcctactccatgaactgggtccgccaagcccccgggaagggactggaatgggtgtcctctatctcctcgtcgtcgtcctacatctactacgccgactccgtgaagggaagattcaccatttcccgcgacaacgcaaagaactcactgtacttgcaaatgaactcactccgggccgaagatactgctgtgtactattgcgccaagactattgccgccgtctacgctttcgacatctggggccagggaaccaccgtgactgtgtcgtccggtggtggtggctcgggcggaggaggaagcggcggcggggggtccgagattgtgctgacccagtcgccactgagcctccctgtgacccccgaggaacccgccagcatcagctgccggtccagccagtccctgctccactccaacggatacaattacctcgattggtaccttcagaagcctggacaaagcccgcagctgctcatctacttgggatcaaaccgcgcgtcaggagtgcctgaccggttctccggctcgggcagcggtaccgatttcaccctgaaaatctccagggtggaggcagaggacgtgggagtgtattactgtatgcaggcgctgcagactccgtacacatttgggcagggcaccaagctggagatcaag

SEQ ID NO: 1505 - protein, 119 aa, Artificial Sequence
  Description of Artificial Sequence: Synthetic polypeptide
EVQLVESGGGLVKPGGSLRLSCAASGFTFSSYSMNWVRQAPGKGLEWVSSISSSSSYIYYADSVKGRFTISRDNAKNSLYLQMNSLRAEDTAVYYCAKTIAAVYAFDIWGQGTTVTVSS

SEQ ID NO: 1506 - protein, 112 aa, Artificial Sequence
  Description of Artificial Sequence: Synthetic polypeptide
EIVLTQSPLSLPVTPEEPASISCRSSQSLLHSNGYNYLDWYLQKPGQSPQLLIYLGSNRASGVPDRFSGSGSGTDFTLKISRVEAEDVGVYYCMQALQTPYTFGQGTKLEIK

SEQ ID NO: 1507 - protein, 490 aa, Artificial Sequence
  Description of Artificial Sequence: Synthetic polypeptide
MALPVTALLLPLALLLHAARPEVQLVESGGGLVKPGGSLRLSCAASGFTFSSYSMNWVRQAPGKGLEWVSSISSSSSYIYYADSVKGRFTISRDNAKNSLYLQMNSLRAEDTAVYYCAKTIAAVYAFDIWGQGTTVTVSSGGGGSGGGGSGGGGSEIVLTQSPLSLPVTPEEPASISCRSSQSLLHSNGYNYLDWYLQKPGQSPQLLIYLGSNRASGVPDRFSGSGSGTDFTLKISRVEAEDVGVYYCMQALQTPYTFGQGTKLEIKTTTPAPRPPTPAPTIASQPLSLRPEACRPAAGGAVHTRGLDFACDIYIWAPLAGTCGVLLLSLVITLYCKRGRKKLLYIFKQPFMRPVQTTQEEDGCSCRFPEEEEGGCELRVKFSRSADAPAYKQGQNQLYNELNLGRREEYDVLDKRRGRDPEMGGKPRRKNPQEGLYNELQKDKMAEAYSEIGMKGERRRGKGHDGLYQGLSTATKDTYDALHMQALPPR

SEQ ID NO: 1508 - DNA, 1470 bp, Artificial Sequence
  Description of Artificial Sequence: Synthetic polynucleotide
atggccctccctgtcaccgccctgctgcttccgctggctcttctgctccacgccgctcggcccgaagtgcagcttgtcgaatccggggggggactggtcaagccgggcggatcactgagactgtcctgcgccgcgagcggcttcacgttctcctcctactccatgaactgggtccgccaagcccccgggaagggactggaatgggtgtcctctatctcctcgtcgtcgtcctacatctactacgccgactccgtgaagggaagattcaccatttcccgcgacaacgcaaagaactcactgtacttgcaaatgaactcactccgggccgaagatactgctgtgtactattgcgccaagactattgccgccgtctacgctttcgacatctggggccagggaaccaccgtgactgtgtcgtccggtggtggtggctcgggcggaggaggaagcggcggcggggggtccgagattgtgctgacccagtcgccactgagcctccctgtgacccccgaggaacccgccagcatcagctgccggtccagccagtccctgctccactccaacggatacaattacctcgattggtaccttcagaagcctggacaaagcccgcagctgctcatctacttgggatcaaaccgcgcgtcaggagtgcctgaccggttctccggctcgggcagcggtaccgatttcaccctgaaaatctccagggtggaggcagaggacgtgggagtgtattactgtatgcaggcgctgcagactccgtacacatttgggcagggcaccaagctggagatcaagaccactaccccagcaccgaggccacccaccccggctcctaccatcgcctcccagcctctgtccctgcgtccggaggcatgtagacccgcagctggtggggccgtgcatacccggggtcttgacttcgcctgcgatatctacatttgggcccctctggctggtacttgcggggtcctgctgctttcactcgtgatcactctttactgtaagcgcggtcggaagaagctgctgtacatctttaagcaacccttcatgaggcctgtgcagactactcaagaggaggacggctgttcatgccggttcccagaggaggaggaaggcggctgcgaactgcgcgtgaaattcagccgcagcgcagatgctccagcctacaagcaggggcagaaccagctctacaacgaactcaatcttggtcggagagaggagtacgacgtgctggacaagcggagaggacgggacccagaaatgggcgggaagccgcgcagaaagaatccccaagagggcctgtacaacgagctccaaaaggataagatggcagaagcctatagcgagattggtatgaaaggggaacgcagaagaggcaaaggccacgacggactgtaccagggactcagcaccgccaccaaggacacctatgacgctcttcacatgcaggccctgccgcctcgg

SEQ ID NO: 1509 - protein, 240 aa, Artificial Sequence
  Description of Artificial Sequence: Synthetic polypeptide
EVQLVESGGGLVKPGGSLRLSCAASGFTFSDYYMSWIRQAPGKGLEWVSYISSSGSTIYYADSVKGRFTISRDNAKNSLYLQMNSLRAEDTAVYYCARDLRGAFDIWGQGTMVTVSSGGGGSGGGGSGGGGSSYVLTQSPSVSAAPGYTATISCGGNNIGTKSVHWYQQKPGQAPLLVIRDDSVRPSKIPGRFSGSNSGNMATLTISGVQAGDEADFYCQVWDSDSEHVVFGGGTKLTVL

SEQ ID NO: 1510 - DNA, 720 bp, Artificial Sequence
  Description of Artificial Sequence: Synthetic polynucleotide
gaagtccagctcgtggagtccggcggaggccttgtgaagcctggaggttcgctgagactgtcctgcgccgcctccggcttcaccttctccgactactacatgtcctggatcagacaggccccgggaaagggcctggaatgggtgtcctacatctcgtcatcgggcagcactatctactacgcggactcagtgaaggggcggttcaccatttcccgggataacgcgaagaactcgctgtatctgcaaatgaactcactgagggccgaggacaccgccgtgtactactgcgcccgcgatctccgcggggcatttgacatctggggacagggaaccatggtcacagtgtccagcggagggggaggatcgggtggcggaggttccgggggtggaggctcctcctacgtgctgactcagagcccaagcgtcagcgctgcgcccggttacacggcaaccatctcctgtggcggaaacaacattgggaccaagtctgtgcactggtatcagcagaagccgggccaagctcccctgttggtgatccgcgatgactccgtgcggcctagcaaaattccgggacggttctccggctccaacagcggcaatatggccactctcaccatctcgggagtgcaggccggagatgaagccgacttctactgccaagtctgggactcagactccgagcatgtggtgttcgggggcggaaccaagctgactgtgctc

SEQ ID NO: 1511 - protein, 117 aa, Artificial Sequence
  Description of Artificial Sequence: Synthetic polypeptide
EVQLVESGGGLVKPGGSLRLSCAASGFTFSDYYMSWIRQAPGKGLEWVSYISSSGSTIYYADSVKGRFTISRDNAKNSLYLQMNSLRAEDTAVYYCARDLRGAFDIWGQGTMVTVSS

SEQ ID NO: 1512 - protein, 108 aa, Artificial Sequence
  Description of Artificial Sequence: Synthetic polypeptide
SYVLTQSPSVSAAPGYTATISCGGNNIGTKSVHWYQQKPGQAPLLVIRDDSVRPSKIPGRFSGSNSGNMATLTISGVQAGDEADFYCQVWDSDSEHVVFGGGTKLTVL

SEQ ID NO: 1513 - protein, 484 aa, Artificial Sequence
  Description of Artificial Sequence: Synthetic polypeptide
MALPVTALLLPLALLLHAARPEVQLVESGGGLVKPGGSLRLSCAASGFTFSDYYMSWIRQAPGKGLEWVSYISSSGSTIYYADSVKGRFTISRDNAKNSLYLQMNSLRAEDTAVYYCARDLRGAFDIWGQGTMVTVSSGGGGSGGGGSGGGGSSYVLTQSPSVSAAPGYTATISCGGNNIGTKSVHWYQQKPGQAPLLVIRDDSVRPSKIPGRFSGSNSGNMATLTISGVQAGDEADFYCQVWDSDSEHVVFGGGTKLTVLTTTPAPRPPTPAPTIASQPLSLRPEACRPAAGGAVHTRGLDFACDIYIWAPLAGTCGVLLLSLVITLYCKRGRKKLLYIFKQPFMRPVQTTQEEDGCSCRFPEEEEGGCELRVKFSRSADAPAYKQGQNQLYNELNLGRREEYDVLDKRRGRDPEMGGKPRRKNPQEGLYNELQKDKMAEAYSEIGMKGERRRGKGHDGLYQGLSTATKDTYDALHMQALPPR

SEQ ID NO: 1514 - DNA, 1452 bp, Artificial Sequence
  Description of Artificial Sequence: Synthetic polynucleotide
atggccctccctgtcaccgccctgctgcttccgctggctcttctgctccacgccgctcggcccgaagtccagctcgtggagtccggcggaggccttgtgaagcctggaggttcgctgagactgtcctgcgccgcctccggcttcaccttctccgactactacatgtcctggatcagacaggccccgggaaagggcctggaatgggtgtcctacatctcgtcatcgggcagcactatctactacgcggactcagtgaaggggcggttcaccatttcccgggataacgcgaagaactcgctgtatctgcaaatgaactcactgagggccgaggacaccgccgtgtactactgcgcccgcgatctccgcggggcatttgacatctggggacagggaaccatggtcacagtgtccagcggagggggaggatcgggtggcggaggttccgggggtggaggctcctcctacgtgctgactcagagcccaagcgtcagcgctgcgcccggttacacggcaaccatctcctgtggcggaaacaacattgggaccaagtctgtgcactggtatcagcagaagccgggccaagctcccctgttggtgatccgcgatgactccgtgcggcctagcaaaattccgggacggttctccggctccaacagcggcaatatggccactctcaccatctcgggagtgcaggccggagatgaagccgacttctactgccaagtctgggactcagactccgagcatgtggtgttcgggggcggaaccaagctgactgtgctcaccactaccccagcaccgaggccacccaccccggctcctaccatcgcctcccagcctctgtccctgcgtccggaggcatgtagacccgcagctggtggggccgtgcatacccggggtcttgacttcgcctgcgatatctacatttgggcccctctggctggtacttgcggggtcctgctgctttcactcgtgatcactctttactgtaagcgcggtcggaagaagctgctgtacatctttaagcaacccttcatgaggcctgtgcagactactcaagaggaggacggctgttcatgccggttcccagaggaggaggaaggcggctgcgaactgcgcgtgaaattcagccgcagcgcagatgctccagcctacaagcaggggcagaaccagctctacaacgaactcaatcttggtcggagagaggagtacgacgtgctggacaagcggagaggacgggacccagaaatgggcgggaagccgcgcagaaagaatccccaagagggcctgtacaacgagctccaaaaggataagatggcagaagcctatagcgagattggtatgaaaggggaacgcagaagaggcaaaggccacgacggactgtaccagggactcagcaccgccaccaaggacacctatgacgctcttcacatgcaggccctgccgcctcgg

SEQ ID NO: 1515 - protein, 241 aa, Artificial Sequence
  Description of Artificial Sequence: Synthetic polypeptide
QVQLVQSGAEVKKPGASVKVSCKPSGYTVTSHYIHWVRRAPGQGLEWMGMINPSGGVTAYSQTLQGRVTMTSDTSSSTVYMELSSLRSEDTAMYYCAREGSGSGWYFDFWGRGTLVTVSSGGGGSGGGGSGGGGSSYVLTQPPSVSVSPGQTASITCSGDGLSKKYVSWYQQKAGQSPVVLISRDKERPSGIPDRFSGSNSADTATLTISGTQAMDEADYYCQAWDDTTVVFGGGTKLTVL

SEQ ID NO: 1516 - DNA, 723 bp, Artificial Sequence
  Description of Artificial Sequence: Synthetic polynucleotide
caagtgcagctggtgcagagcggggccgaagtcaagaagccgggagcctccgtgaaagtgtcctgcaagccttcgggatacaccgtgacctcccactacattcattgggtccgccgcgcccccggccaaggactcgagtggatgggcatgatcaaccctagcggcggagtgaccgcgtacagccagacgctgcagggacgcgtgactatgacctcggatacctcctcctccaccgtctatatggaactgtccagcctgcggtccgaggataccgccatgtactactgcgcccgggaaggatcaggctccgggtggtatttcgacttctggggaagaggcaccctcgtgactgtgtcatctgggggagggggttccggtggtggcggatcgggaggaggcggttcatcctacgtgctgacccagccaccctccgtgtccgtgagccccggccagactgcatcgattacatgtagcggcgacggcctctccaagaaatacgtgtcgtggtaccagcagaaggccggacagagcccggtggtgctgatctcaagagataaggagcggcctagcggaatcccggacaggttctcgggttccaactccgcggacactgctactctgaccatctcggggacccaggctatggacgaagccgattactactgccaagcctgggacgacactactgtcgtgtttggagggggcaccaagttgaccgtcctt

SEQ ID NO: 1517 - protein, 120 aa, Artificial Sequence
  Description of Artificial Sequence: Synthetic polypeptide
QVQLVQSGAEVKKPGASVKVSCKPSGYTVTSHYIHWVRRAPGQGLEWMGMINPSGGVTAYSQTLQGRVTMTSDTSSSTVYMELSSLRSEDTAMYYCAREGSGSGWYFDFWGRGTLVTVSS

SEQ ID NO: 1518 - protein, 106 aa, Artificial Sequence
  Description of Artificial Sequence: Synthetic polypeptide
SYVLTQPPSVSVSPGQTASITCSGDGLSKKYVSWYQQKAGQSPVVLISRDKERPSGIPDRFSGSNSADTATLTISGTQAMDEADYYCQAWDDTTVVFGGGTKLTVL

SEQ ID NO: 1519 - protein, 485 aa, Artificial Sequence
  Description of Artificial Sequence: Synthetic polypeptide
MALPVTALLLPLALLLHAARPQVQLVQSGAEVKKPGASVKVSCKPSGYTVTSHYIHWVRRAPGQGLEWMGMINPSGGVTAYSQTLQGRVTMTSDTSSSTVYMELSSLRSEDTAMYYCAREGSGSGWYFDFWGRGTLVTVSSGGGGSGGGGSGGGGSSYVLTQPPSVSVSPGQTASITCSGDGLSKKYVSWYQQKAGQSPVVLISRDKERPSGIPDRFSGSNSADTATLTISGTQAMDEADYYCQAWDDTTVVFGGGTKLTVLTTTPAPRPPTPAPTIASQPLSLRPEACRPAAGGAVHTRGLDFACDIYIWAPLAGTCGVLLLSLVITLYCKRGRKKLLYIFKQPFMRPVQTTQEEDGCSCRFPEEEEGGCELRVKFSRSADAPAYKQGQNQLYNELNLGRREEYDVLDKRRGRDPEMGGKPRRKNPQEGLYNELQKDKMAEAYSEIGMKGERRRGKGHDGLYQGLSTATKDTYDALHMQALPPR

SEQ ID NO: 1520 - DNA, 1455 bp, Artificial Sequence
  Description of Artificial Sequence: Synthetic polynucleotide
atggccctccctgtcaccgccctgctgcttccgctggctcttctgctccacgccgctcggccccaagtgcagctggtgcagagcggggccgaagtcaagaagccgggagcctccgtgaaagtgtcctgcaagccttcgggatacaccgtgacctcccactacattcattgggtccgccgcgcccccggccaaggactcgagtggatgggcatgatcaaccctagcggcggagtgaccgcgtacagccagacgctgcagggacgcgtgactatgacctcggatacctcctcctccaccgtctatatggaactgtccagcctgcggtccgaggataccgccatgtactactgcgcccgggaaggatcaggctccgggtggtatttcgacttctggggaagaggcaccctcgtgactgtgtcatctgggggagggggttccggtggtggcggatcgggaggaggcggttcatcctacgtgctgacccagccaccctccgtgtccgtgagccccggccagactgcatcgattacatgtagcggcgacggcctctccaagaaatacgtgtcgtggtaccagcagaaggccggacagagcccggtggtgctgatctcaagagataaggagcggcctagcggaatcccggacaggttctcgggttccaactccgcggacactgctactctgaccatctcggggacccaggctatggacgaagccgattactactgccaagcctgggacgacactactgtcgtgtttggagggggcaccaagttgaccgtccttaccactaccccagcaccgaggccacccaccccggctcctaccatcgcctcccagcctctgtccctgcgtccggaggcatgtagacccgcagctggtggggccgtgcatacccggggtcttgacttcgcctgcgatatctacatttgggcccctctggctggtacttgcggggtcctgctgctttcactcgtgatcactctttactgtaagcgcggtcggaagaagctgctgtacatctttaagcaacccttcatgaggcctgtgcagactactcaagaggaggacggctgttcatgccggttcccagaggaggaggaaggcggctgcgaactgcgcgtgaaattcagccgcagcgcagatgctccagcctacaagcaggggcagaaccagctctacaacgaactcaatcttggtcggagagaggagtacgacgtgctggacaagcggagaggacgggacccagaaatgggcgggaagccgcgcagaaagaatccccaagagggcctgtacaacgagctccaaaaggataagatggcagaagcctatagcgagattggtatgaaaggggaacgcagaagaggcaaaggccacgacggactgtaccagggactcagcaccgccaccaaggacacctatgacgctcttcacatgcaggccctgccgcctcgg

SEQ ID NO: 1521 - protein, 245 aa, Artificial Sequence
  Description of Artificial Sequence: Synthetic polypeptide
QVQLQESGPGLVKPSQTLSLTCTVSGGSISSGGYYWSWIRQHPGKGLEWIGYIYYSGSTYYNPSLKSRVTISVDTSKNQFSLKLSSVTAADTAVYYCARAGIAARLRGAFDIWGQGTMVTVSSGGGGSGGGGSGGGGSDIVMTQSPSSVSASVGDRVIITCRASQGIRNWLAWYQQKPGKAPNLLIYAASNLQSGVPSRFSGSGSGADFTLTISSLQPEDVATYYCQKYNSAPFTFGPGTKVDIK

SEQ ID NO: 1522 - DNA, 735 bp, Artificial Sequence
  Description of Artificial Sequence: Synthetic polynucleotide
caagtgcagcttcaggagagcggcccgggactcgtgaagccgtcccagaccctgtccctgacttgcaccgtgtcgggaggaagcatctcgagcggaggctactattggtcgtggattcggcagcaccctggaaagggcctggaatggatcggctacatctactactccggctcgacctactacaacccatcgctgaagtccagagtgacaatctcagtggacacgtccaagaatcagttcagcctgaagctctcttccgtgactgcggccgacaccgccgtgtactactgcgcacgcgctggaattgccgcccggctgaggggtgccttcgacatttggggacagggcaccatggtcaccgtgtcctccggcggcggaggttccgggggtggaggctcaggaggaggggggtccgacatcgtcatgactcagtcgccctcaagcgtcagcgcgtccgtcggggacagagtgatcatcacctgtcgggcgtcccagggaattcgcaactggctggcctggtatcagcagaagcccggaaaggcccccaacctgttgatctacgccgcctcaaacctccaatccggggtgccgagccgcttcagcggctccggttcgggtgccgatttcactctgaccatctcctccctgcaacctgaagatgtggctacctactactgccaaaagtacaactccgcaccttttactttcggaccggggaccaaagtggacattaag

SEQ ID NO: 1523 - protein, 123 aa, Artificial Sequence
  Description of Artificial Sequence: Synthetic polypeptide
QVQLQESGPGLVKPSQTLSLTCTVSGGSISSGGYYWSWIRQHPGKGLEWIGYIYYSGSTYYNPSLKSRVTISVDTSKNQFSLKLSSVTAADTAVYYCARAGIAARLRGAFDIWGQGTMVTVSS

SEQ ID NO: 1524 - protein, 107 aa, Artificial Sequence
  Description of Artificial Sequence: Synthetic polypeptide
DIVMTQSPSSVSASVGDRVIITCRASQGIRNWLAWYQQKPGKAPNLLIYAASNLQSGVPSRFSGSGSGADFTLTISSLQPEDVATYYCQKYNSAPFTFGPGTKVDIK

SEQ ID NO: 1525 - protein, 489 aa, Artificial Sequence
  Description of Artificial Sequence: Synthetic polypeptide
MALPVTALLLPLALLLHAARPQVQLQESGPGLVKPSQTLSLTCTVSGGSISSGGYYWSWIRQHPGKGLEWIGYIYYSGSTYYNPSLKSRVTISVDTSKNQFSLKLSSVTAADTAVYYCARAGIAARLRGAFDIWGQGTMVTVSSGGGGSGGGGSGGGGSDIVMTQSPSSVSASVGDRVIITCRASQGIRNWLAWYQQKPGKAPNLLIYAASNLQSGVPSRFSGSGSGADFTLTISSLQPEDVATYYCQKYNSAPFTFGPGTKVDIKTTTPAPRPPTPAPTIASQPLSLRPEACRPAAGGAVHTRGLDFACDIYIWAPLAGTCGVLLLSLVITLYCKRGRKKLLYIFKQPFMRPVQTTQEEDGCSCRFPEEEEGGCELRVKFSRSADAPAYKQGQNQLYNELNLGRREEYDVLDKRRGRDPEMGGKPRRKNPQEGLYNELQKDKMAEAYSEIGMKGERRRGKGHDGLYQGLSTATKDTYDALHMQALPPR

SEQ ID NO: 1526 - DNA, 1467 bp, Artificial Sequence
  Description of Artificial Sequence: Synthetic polynucleotide
atggccctccctgtcaccgccctgctgcttccgctggctcttctgctccacgccgctcggccccaagtgcagcttcaggagagcggcccgggactcgtgaagccgtcccagaccctgtccctgacttgcaccgtgtcgggaggaagcatctcgagcggaggctactattggtcgtggattcggcagcaccctggaaagggcctggaatggatcggctacatctactactccggctcgacctactacaacccatcgctgaagtccagagtgacaatctcagtggacacgtccaagaatcagttcagcctgaagctctcttccgtgactgcggccgacaccgccgtgtactactgcgcacgcgctggaattgccgcccggctgaggggtgccttcgacatttggggacagggcaccatggtcaccgtgtcctccggcggcggaggttccgggggtggaggctcaggaggaggggggtccgacatcgtcatgactcagtcgccctcaagcgtcagcgcgtccgtcggggacagagtgatcatcacctgtcgggcgtcccagggaattcgcaactggctggcctggtatcagcagaagcccggaaaggcccccaacctgttgatctacgccgcctcaaacctccaatccggggtgccgagccgcttcagcggctccggttcgggtgccgatttcactctgaccatctcctccctgcaacctgaagatgtggctacctactactgccaaaagtacaactccgcaccttttactttcggaccggggaccaaagtggacattaagaccactaccccagcaccgaggccacccaccccggctcctaccatcgcctcccagcctctgtccctgcgtccggaggcatgtagacccgcagctggtggggccgtgcatacccggggtcttgacttcgcctgcgatatctacatttgggcccctctggctggtacttgcggggtcctgctgctttcactcgtgatcactctttactgtaagcgcggtcggaagaagctgctgtacatctttaagcaacccttcatgaggcctgtgcagactactcaagaggaggacggctgttcatgccggttcccagaggaggaggaaggcggctgcgaactgcgcgtgaaattcagccgcagcgcagatgctccagcctacaagcaggggcagaaccagctctacaacgaactcaatcttggtcggagagaggagtacgacgtgctggacaagcggagaggacgggacccagaaatgggcgggaagccgcgcagaaagaatccccaagagggcctgtacaacgagctccaaaaggataagatggcagaagcctatagcgagattggtatgaaaggggaacgcagaagaggcaaaggccacgacggactgtaccagggactcagcaccgccaccaaggacacctatgacgctcttcacatgcaggccctgccgcctcgg

SEQ ID NO: 1527 - protein, 253 aa, Artificial Sequence
  Description of Artificial Sequence: Synthetic polypeptide
QVQLVQSGAEVKKPGSSVKVSCKASGGTFSSYAISWVRQAPGQGLEWMGGIIPIFGTANYAQKFQGRVTITADESTSTAYMELSSLRSEDTAVYYCARRGGYQLLRWDVGLLRSAFDIWGQGTMVTVSSGGGGSGGGGSGGGGSSYVLTQPPSVSVAPGQTARITCGGNNIGSKSVHWYQQKPGQAPVLVLYGKNNRPSGVPDRFSGSRSGTTASLTITGAQAEDEADYYCSSRDSSGDHLRVFGTGTKVTVL

SEQ ID NO: 1528 - DNA, 759 bp, Artificial Sequence
  Description of Artificial Sequence: Synthetic polynucleotide
caagtgcagctggtccagtcgggcgccgaggtcaagaagcccgggagctctgtgaaagtgtcctgcaaggcctccgggggcacctttagctcctacgccatctcctgggtccgccaagcaccgggtcaaggcctggagtggatggggggaattatccctatcttcggcactgccaactacgcccagaagttccagggacgcgtgaccattaccgcggacgaatccacctccaccgcttatatggagctgtccagcttgcgctcggaagataccgccgtgtactactgcgcccggaggggtggataccagctgctgagatgggacgtgggcctcctgcggtcggcgttcgacatctggggccagggcactatggtcactgtgtccagcggaggaggcggatcgggaggcggcggatcagggggaggcggttccagctacgtgcttactcaacccccttcggtgtccgtggccccgggacagaccgccagaatcacttgcggaggaaacaacattgggtccaagagcgtgcattggtaccagcagaagccaggacaggcccctgtgctggtgctctacgggaagaacaatcggcccagcggagtgccggacaggttctcgggttcacgctccggtacaaccgcttcactgactatcaccggggcccaggcagaggatgaagcggactactactgttcctcccgggattcatccggcgaccacctccgggtgttcggaaccggaacgaaggtcaccgtgctg

SEQ ID NO: 1529 - protein, 129 aa, Artificial Sequence
  Description of Artificial Sequence: Synthetic polypeptide
QVQLVQSGAEVKKPGSSVKVSCKASGGTFSSYAISWVRQAPGQGLEWMGGIIPIFGTANYAQKFQGRVTITADESTSTAYMELSSLRSEDTAVYYCARRGGYQLLRWDVGLLRSAFDIWGQGTMVTVSS

SEQ ID NO: 1530 - protein, 109 aa, Artificial Sequence
  Description of Artificial Sequence: Synthetic polypeptide
SYVLTQPPSVSVAPGQTARITCGGNNIGSKSVHWYQQKPGQAPVLVLYGKNNRPSGVPDRFSGSRSGTTASLTITGAQAEDEADYYCSSRDSSGDHLRVFGTGTKVTVL

SEQ ID NO: 1531 - protein, 497 aa, Artificial Sequence
  Description of Artificial Sequence: Synthetic polypeptide
MALPVTALLLPLALLLHAARPQVQLVQSGAEVKKPGSSVKVSCKASGGTFSSYAISWVRQAPGQGLEWMGGIIPIFGTANYAQKFQGRVTITADESTSTAYMELSSLRSEDTAVYYCARRGGYQLLRWDVGLLRSAFDIWGQGTMVTVSSGGGGSGGGGSGGGGSSYVLTQPPSVSVAPGQTARITCGGNNIGSKSVHWYQQKPGQAPVLVLYGKNNRPSGVPDRFSGSRSGTTASLTITGAQAEDEADYYCSSRDSSGDHLRVFGTGTKVTVLTTTPAPRPPTPAPTIASQPLSLRPEACRPAAGGAVHTRGLDFACDIYIWAPLAGTCGVLLLSLVITLYCKRGRKKLLYIFKQPFMRPVQTTQEEDGCSCRFPEEEEGGCELRVKFSRSADAPAYKQGQNQLYNELNLGRREEYDVLDKRRGRDPEMGGKPRRKNPQEGLYNELQKDKMAEAYSEIGMKGERRRGKGHDGLYQGLSTATKDTYDALHMQALPPR

SEQ ID NO: 1532 - DNA, 1491 bp, Artificial Sequence
  Description of Artificial Sequence: Synthetic polynucleotide
atggccctccctgtcaccgccctgctgcttccgctggctcttctgctccacgccgctcggccccaagtgcagctggtccagtcgggcgccgaggtcaagaagcccgggagctctgtgaaagtgtcctgcaaggcctccgggggcacctttagctcctacgccatctcctgggtccgccaagcaccgggtcaaggcctggagtggatggggggaattatccctatcttcggcactgccaactacgcccagaagttccagggacgcgtgaccattaccgcggacgaatccacctccaccgcttatatggagctgtccagcttgcgctcggaagataccgccgtgtactactgcgcccggaggggtggataccagctgctgagatgggacgtgggcctcctgcggtcggcgttcgacatctggggccagggcactatggtcactgtgtccagcggaggaggcggatcgggaggcggcggatcagggggaggcggttccagctacgtgcttactcaacccccttcggtgtccgtggccccgggacagaccgccagaatcacttgcggaggaaacaacattgggtccaagagcgtgcattggtaccagcagaagccaggacaggcccctgtgctggtgctctacgggaagaacaatcggcccagcggagtgccggacaggttctcgggttcacgctccggtacaaccgcttcactgactatcaccggggcccaggcagaggatgaagcggactactactgttcctcccgggattcatccggcgaccacctccgggtgttcggaaccggaacgaaggtcaccgtgctgaccactaccccagcaccgaggccacccaccccggctcctaccatcgcctcccagcctctgtccctgcgtccggaggcatgtagacccgcagctggtggggccgtgcatacccggggtcttgacttcgcctgcgatatctacatttgggcccctctggctggtacttgcggggtcctgctgctttcactcgtgatcactctttactgtaagcgcggtcggaagaagctgctgtacatctttaagcaacccttcatgaggcctgtgcagactactcaagaggaggacggctgttcatgccggttcccagaggaggaggaaggcggctgcgaactgcgcgtgaaattcagccgcagcgcagatgctccagcctacaagcaggggcagaaccagctctacaacgaactcaatcttggtcggagagaggagtacgacgtgctggacaagcggagaggacgggacccagaaatgggcgggaagccgcgcagaaagaatccccaagagggcctgtacaacgagctccaaaaggataagatggcagaagcctatagcgagattggtatgaaaggggaacgcagaagaggcaaaggccacgacggactgtaccagggactcagcaccgccaccaaggacacctatgacgctcttcacatgcaggccctgccgcctcgg

SEQ ID NO: 1533 - protein, 248 aa, Artificial Sequence
  Description of Artificial Sequence: Synthetic polypeptide
EVQLQQSGPGLVKPSQTLSLTCAISGDSVSSNSAAWNWIRQSPSRGLEWLGRTYYRSKWYSFYAISLKSRIIINPDTSKNQFSLQLKSVTPEDTAVYYCARSSPEGLFLYWFDPWGQGTLVTVSSGGDGSGGGGSGGGGSSSELTQDPAVSVALGQTIRITCQGDSLGNYYATWYQQKPGQAPVLVIYGTNNRPSGIPDRFSASSSGNTASLTITGAQAEDEADYYCNSRDSSGHHLLFGTGTKVTVL

SEQ ID NO: 1534 - DNA, 744 bp, Artificial Sequence
  Description of Artificial Sequence: Synthetic polynucleotide
gaagtgcagctccaacagtcaggaccggggctcgtgaagccatcccagaccctgtccctgacttgtgccatctcgggagatagcgtgtcatcgaactccgccgcctggaactggattcggcagagcccgtcccgcggactggagtggcttggaaggacctactaccggtccaagtggtactctttctacgcgatctcgctgaagtcccgcattatcattaaccctgatacctccaagaatcagttctccctccaactgaaatccgtcacccccgaggacacagcagtgtattactgcgcacggagcagccccgaaggactgttcctgtattggtttgacccctggggccaggggactcttgtgaccgtgtcgagcggcggagatgggtccggtggcggtggttcggggggcggcggatcatcatccgaactgacccaggacccggctgtgtccgtggcgctgggacaaaccatccgcattacgtgccagggagactccctgggcaactactacgccacttggtaccagcagaagccgggccaagcccctgtgttggtcatctacgggaccaacaacagaccttccggcatccccgaccggttcagcgcttcgtcctccggcaacactgccagcctgaccatcactggagcgcaggccgaagatgaggccgactactactgcaacagcagagactcctcgggtcatcacctcttgttcggaactggaaccaaggtcaccgtgctg

SEQ ID NO: 1535 - protein, 125 aa, Artificial Sequence
  Description of Artificial Sequence: Synthetic polypeptide
EVQLQQSGPGLVKPSQTLSLTCAISGDSVSSNSAAWNWIRQSPSRGLEWLGRTYYRSKWYSFYAISLKSRIIINPDTSKNQFSLQLKSVTPEDTAVYYCARSSPEGLFLYWFDPWGQGTLVTVSS

SEQ ID NO: 1536 - protein, 108 aa, Artificial Sequence
  Description of Artificial Sequence: Synthetic polypeptide
SSELTQDPAVSVALGQTIRITCQGDSLGNYYATWYQQKPGQAPVLVIYGTNNRPSGIPDRFSASSSGNTASLTITGAQAEDEADYYCNSRDSSGHHLLFGTGTKVTVL

SEQ ID NO: 1537 - protein, 492 aa, Artificial Sequence
  Description of Artificial Sequence: Synthetic polypeptide
MALPVTALLLPLALLLHAARPEVQLQQSGPGLVKPSQTLSLTCAISGDSVSSNSAAWNWIRQSPSRGLEWLGRTYYRSKWYSFYAISLKSRIIINPDTSKNQFSLQLKSVTPEDTAVYYCARSSPEGLFLYWFDPWGQGTLVTVSSGGDGSGGGGSGGGGSSSELTQDPAVSVALGQTIRITCQGDSLGNYYATWYQQKPGQAPVLVIYGTNNRPSGIPDRFSASSSGNTASLTITGAQAEDEADYYCNSRDSSGHHLLFGTGTKVTVLTTTPAPRPPTPAPTIASQPLSLRPEACRPAAGGAVHTRGLDFACDIYIWAPLAGTCGVLLLSLVITLYCKRGRKKLLYIFKQPFMRPVQTTQEEDGCSCRFPEEEEGGCELRVKFSRSADAPAYKQGQNQLYNELNLGRREEYDVLDKRRGRDPEMGGKPRRKNPQEGLYNELQKDKMAEAYSEIGMKGERRRGKGHDGLYQGLSTATKDTYDALHMQALPPR

SEQ ID NO: 1538 - DNA, 1476 bp, Artificial Sequence
  Description of Artificial Sequence: Synthetic polynucleotide
atggccctccctgtcaccgccctgctgcttccgctggctcttctgctccacgccgctcggcccgaagtgcagctccaacagtcaggaccggggctcgtgaagccatcccagaccctgtccctgacttgtgccatctcgggagatagcgtgtcatcgaactccgccgcctggaactggattcggcagagcccgtcccgcggactggagtggcttggaaggacctactaccggtccaagtggtactctttctacgcgatctcgctgaagtcccgcattatcattaaccctgatacctccaagaatcagttctccctccaactgaaatccgtcacccccgaggacacagcagtgtattactgcgcacggagcagccccgaaggactgttcctgtattggtttgacccctggggccaggggactcttgtgaccgtgtcgagcggcggagatgggtccggtggcggtggttcggggggcggcggatcatcatccgaactgacccaggacccggctgtgtccgtggcgctgggacaaaccatccgcattacgtgccagggagactccctgggcaactactacgccacttggtaccagcagaagccgggccaagcccctgtgttggtcatctacgggaccaacaacagaccttccggcatccccgaccggttcagcgcttcgtcctccggcaacactgccagcctgaccatcactggagcgcaggccgaagatgaggccgactactactgcaacagcagagactcctcgggtcatcacctcttgttcggaactggaaccaaggtcaccgtgctgaccactaccccagcaccgaggccacccaccccggctcctaccatcgcctcccagcctctgtccctgcgtccggaggcatgtagacccgcagctggtggggccgtgcatacccggggtcttgacttcgcctgcgatatctacatttgggcccctctggctggtacttgcggggtcctgctgctttcactcgtgatcactctttactgtaagcgcggtcggaagaagctgctgtacatctttaagcaacccttcatgaggcctgtgcagactactcaagaggaggacggctgttcatgccggttcccagaggaggaggaaggcggctgcgaactgcgcgtgaaattcagccgcagcgcagatgctccagcctacaagcaggggcagaaccagctctacaacgaactcaatcttggtcggagagaggagtacgacgtgctggacaagcggagaggacgggacccagaaatgggcgggaagccgcgcagaaagaatccccaagagggcctgtacaacgagctccaaaaggataagatggcagaagcctatagcgagattggtatgaaaggggaacgcagaagaggcaaaggccacgacggactgtaccagggactcagcaccgccaccaaggacacctatgacgctcttcacatgcaggccctgccgcctcgg

SEQ ID NO: 1539 - protein, 246 aa, Artificial Sequence
  Description of Artificial Sequence: Synthetic polypeptide
EVQLVESGGGLVQPGGSLRLSCAASGFTFSSYAMSWVRQAPGKGLEWVSAISGSGGSTYYADSVKGRFTISRDNSKNTLYLQMNSLRAEDTAVYYCAKVEGSGSLDYWGQGTLVTVSSGGGGSGGGGSGGGGSEIVMTQSPGTLSLSPGERATLSCRASQSVSSAYLAWYQQKPGQPPRLLISGASTRATGIPDRFGGSGSGTDFTLTISRLEPEDFAVYYCQHYGSSFNGSSLFTFGQGTRLEIK

SEQ ID NO: 1540 - DNA, 738 bp, Artificial Sequence
  Description of Artificial Sequence: Synthetic polynucleotide
gaagtgcagctcgtggagtcaggaggcggcctggtccagccgggagggtcccttagactgtcatgcgccgcaagcggattcactttctcctcctatgccatgagctgggtccgccaagcccccggaaagggactggaatgggtgtccgccatctcggggtctggaggctcaacttactacgctgactccgtgaagggacggttcaccattagccgcgacaactccaagaacaccctctacctccaaatgaactccctgcgggccgaggataccgccgtctactactgcgccaaagtggaaggttcaggatcgctggactactggggacagggtactctcgtgaccgtgtcatcgggcggaggaggttccggcggtggcggctccggcggcggagggtcggagatcgtgatgacccagagccctggtactctgagcctttcgccgggagaaagggccaccctgtcctgccgcgcttcccaatccgtgtcctccgcgtacttggcgtggtaccagcagaagccgggacagccccctcggctgctgatcagcggggccagcacccgggcaaccggaatcccagacagattcgggggttccggcagcggcacagatttcaccctgactatttcgaggttggagcccgaggactttgcggtgtattactgtcagcactacgggtcgtcctttaatggctccagcctgttcacgttcggacaggggacccgcctggaaatcaag

SEQ ID NO: 1541 - protein, 118 aa, Artificial Sequence
  Description of Artificial Sequence: Synthetic polypeptide
EVQLVESGGGLVQPGGSLRLSCAASGFTFSSYAMSWVRQAPGKGLEWVSAISGSGGSTYYADSVKGRFTISRDNSKNTLYLQMNSLRAEDTAVYYCAKVEGSGSLDYWGQGTLVTVSS

SEQ ID NO: 1542 - protein, 113 aa, Artificial Sequence
  Description of Artificial Sequence: Synthetic polypeptide
EIVMTQSPGTLSLSPGERATLSCRASQSVSSAYLAWYQQKPGQPPRLLISGASTRATGIPDRFGGSGSGTDFTLTISRLEPEDFAVYYCQHYGSSFNGSSLFTFGQGTRLEIK

SEQ ID NO: 1543 - protein, 490 aa, Artificial Sequence
  Description of Artificial Sequence: Synthetic polypeptide
MALPVTALLLPLALLLHAARPEVQLVESGGGLVQPGGSLRLSCAASGFTFSSYAMSWVRQAPGKGLEWVSAISGSGGSTYYADSVKGRFTISRDNSKNTLYLQMNSLRAEDTAVYYCAKVEGSGSLDYWGQGTLVTVSSGGGGSGGGGSGGGGSEIVMTQSPGTLSLSPGERATLSCRASQSVSSAYLAWYQQKPGQPPRLLISGASTRATGIPDRFGGSGSGTDFTLTISRLEPEDFAVYYCQHYGSSFNGSSLFTFGQGTRLEIKTTTPAPRPPTPAPTIASQPLSLRPEACRPAAGGAVHTRGLDFACDIYIWAPLAGTCGVLLLSLVITLYCKRGRKKLLYIFKQPFMRPVQTTQEEDGCSCRFPEEEEGGCELRVKFSRSADAPAYKQGQNQLYNELNLGRREEYDVLDKRRGRDPEMGGKPRRKNPQEGLYNELQKDKMAEAYSEIGMKGERRRGKGHDGLYQGLSTATKDTYDALHMQALPPR

SEQ ID NO: 1544 - DNA, 1470 bp, Artificial Sequence
  Description of Artificial Sequence: Synthetic polynucleotide
atggccctccctgtcaccgccctgctgcttccgctggctcttctgctccacgccgctcggcccgaagtgcagctcgtggagtcaggaggcggcctggtccagccgggagggtcccttagactgtcatgcgccgcaagcggattcactttctcctcctatgccatgagctgggtccgccaagcccccggaaagggactggaatgggtgtccgccatctcggggtctggaggctcaacttactacgctgactccgtgaagggacggttcaccattagccgcgacaactccaagaacaccctctacctccaaatgaactccctgcgggccgaggataccgccgtctactactgcgccaaagtggaaggttcaggatcgctggactactggggacagggtactctcgtgaccgtgtcatcgggcggaggaggttccggcggtggcggctccggcggcggagggtcggagatcgtgatgacccagagccctggtactctgagcctttcgccgggagaaagggccaccctgtcctgccgcgcttcccaatccgtgtcctccgcgtacttggcgtggtaccagcagaagccgggacagccccctcggctgctgatcagcggggccagcacccgggcaaccggaatcccagacagattcgggggttccggcagcggcacagatttcaccctgactatttcgaggttggagcccgaggactttgcggtgtattactgtcagcactacgggtcgtcctttaatggctccagcctgttcacgttcggacaggggacccgcctggaaatcaagaccactaccccagcaccgaggccacccaccccggctcctaccatcgcctcccagcctctgtccctgcgtccggaggcatgtagacccgcagctggtggggccgtgcatacccggggtcttgacttcgcctgcgatatctacatttgggcccctctggctggtacttgcggggtcctgctgctttcactcgtgatcactctttactgtaagcgcggtcggaagaagctgctgtacatctttaagcaacccttcatgaggcctgtgcagactactcaagaggaggacggctgttcatgccggttcccagaggaggaggaaggcggctgcgaactgcgcgtgaaattcagccgcagcgcagatgctccagcctacaagcaggggcagaaccagctctacaacgaactcaatcttggtcggagagaggagtacgacgtgctggacaagcggagaggacgggacccagaaatgggcgggaagccgcgcagaaagaatccccaagagggcctgtacaacgagctccaaaaggataagatggcagaagcctatagcgagattggtatgaaaggggaacgcagaagaggcaaaggccacgacggactgtaccagggactcagcaccgccaccaaggacacctatgacgctcttcacatgcaggccctgccgcctcgg

SEQ ID NO: 1545 - protein, 241 aa, Artificial Sequence
  Description of Artificial Sequence: Synthetic polypeptide
EVQLVETGGGLVQPGGSLRLSCAASGITFSRYPMSWVRQAPGKGLEWVSGISDSGVSTYYADSAKGRFTISRDNSKNTLFLQMSSLRDEDTAVYYCVTRAGSEASDIWGQGTMVTVSSGGGGSGGGGSGGGGSEIVLTQSPATLSLSPGERATLSCRASQSVSNSLAWYQQKPGQAPRLLIYDASSRATGIPDRFSGSGSGTDFTLTISRLEPEDFAIYYCQQFGTSSGLTFGGGTKLEIK

SEQ ID NO: 1546 - DNA, 723 bp, Artificial Sequence
  Description of Artificial Sequence: Synthetic polynucleotide
gaagtgcaactggtggaaaccggtggcggcctggtgcagcctggaggatcattgaggctgtcatgcgcggccagcggtattaccttctcccggtaccccatgtcctgggtcagacaggccccggggaaagggcttgaatgggtgtccgggatctcggactccggtgtcagcacttactacgccgactccgccaagggacgcttcaccatttcccgggacaactcgaagaacaccctgttcctccaaatgagctccctccgggacgaggatactgcagtgtactactgcgtgacccgcgccgggtccgaggcgtctgacatttggggacagggcactatggtcaccgtgtcgtccggcggagggggctcgggaggcggtggcagcggaggaggagggtccgagatcgtgctgacccaatccccggccaccctctcgctgagccctggagaaagggcaaccttgtcctgtcgcgcgagccagtccgtgagcaactccctggcctggtaccagcagaagcccggacaggctccgagacttctgatctacgacgcttcgagccgggccactggaatccccgaccgcttttcggggtccggctcaggaaccgatttcaccctgacaatctcacggctggagccagaggatttcgccatctattactgccagcagttcggtacttcctccggcctgactttcggaggcggcacgaagctcgaaatcaag

SEQ ID NO: 1547 - protein, 118 aa, Artificial Sequence
  Description of Artificial Sequence: Synthetic polypeptide
EVQLVETGGGLVQPGGSLRLSCAASGITFSRYPMSWVRQAPGKGLEWVSGISDSGVSTYYADSAKGRFTISRDNSKNTLFLQMSSLRDEDTAVYYCVTRAGSEASDIWGQGTMVTVSS

SEQ ID NO: 1548 - protein, 108 aa, Artificial Sequence
  Description of Artificial Sequence: Synthetic polypeptide
EIVLTQSPATLSLSPGERATLSCRASQSVSNSLAWYQQKPGQAPRLLIYDASSRATGIPDRFSGSGSGTDFTLTISRLEPEDFAIYYCQQFGTSSGLTFGGGTKLEIK

SEQ ID NO: 1549 - protein, 485 aa, Artificial Sequence
  Description of Artificial Sequence: Synthetic polypeptide
MALPVTALLLPLALLLHAARPEVQLVETGGGLVQPGGSLRLSCAASGITFSRYPMSWVRQAPGKGLEWVSGISDSGVSTYYADSAKGRFTISRDNSKNTLFLQMSSLRDEDTAVYYCVTRAGSEASDIWGQGTMVTVSSGGGGSGGGGSGGGGSEIVLTQSPATLSLSPGERATLSCRASQSVSNSLAWYQQKPGQAPRLLIYDASSRATGIPDRFSGSGSGTDFTLTISRLEPEDFAIYYCQQFGTSSGLTFGGGTKLEIKTTTPAPRPPTPAPTIASQPLSLRPEACRPAAGGAVHTRGLDFACDIYIWAPLAGTCGVLLLSLVITLYCKRGRKKLLYIFKQPFMRPVQTTQEEDGCSCRFPEEEEGGCELRVKFSRSADAPAYKQGQNQLYNELNLGRREEYDVLDKRRGRDPEMGGKPRRKNPQEGLYNELQKDKMAEAYSEIGMKGERRRGKGHDGLYQGLSTATKDTYDALHMQALPPR

SEQ ID NO: 1550 - DNA, 1455 bp, Artificial Sequence
  Description of Artificial Sequence: Synthetic polynucleotide
atggccctccctgtcaccgccctgctgcttccgctggctcttctgctccacgccgctcggcccgaagtgcaactggtggaaaccggtggcggcctggtgcagcctggaggatcattgaggctgtcatgcgcggccagcggtattaccttctcccggtaccccatgtcctgggtcagacaggccccggggaaagggcttgaatgggtgtccgggatctcggactccggtgtcagcacttactacgccgactccgccaagggacgcttcaccatttcccgggacaactcgaagaacaccctgttcctccaaatgagctccctccgggacgaggatactgcagtgtactactgcgtgacccgcgccgggtccgaggcgtctgacatttggggacagggcactatggtcaccgtgtcgtccggcggagggggctcgggaggcggtggcagcggaggaggagggtccgagatcgtgctgacccaatccccggccaccctctcgctgagccctggagaaagggcaaccttgtcctgtcgcgcgagccagtccgtgagcaactccctggcctggtaccagcagaagcccggacaggctccgagacttctgatctacgacgcttcgagccgggccactggaatccccgaccgcttttcggggtccggctcaggaaccgatttcaccctgacaatctcacggctggagccagaggatttcgccatctattactgccagcagttcggtacttcctccggcctgactttcggaggcggcacgaagctcgaaatcaagaccactaccccagcaccgaggccacccaccccggctcctaccatcgcctcccagcctctgtccctgcgtccggaggcatgtagacccgcagctggtggggccgtgcatacccggggtcttgacttcgcctgcgatatctacatttgggcccctctggctggtacttgcggggtcctgctgctttcactcgtgatcactctttactgtaagcgcggtcggaagaagctgctgtacatctttaagcaacccttcatgaggcctgtgcagactactcaagaggaggacggctgttcatgccggttcccagaggaggaggaaggcggctgcgaactgcgcgtgaaattcagccgcagcgcagatgctccagcctacaagcaggggcagaaccagctctacaacgaactcaatcttggtcggagagaggagtacgacgtgctggacaagcggagaggacgggacccagaaatgggcgggaagccgcgcagaaagaatccccaagagggcctgtacaacgagctccaaaaggataagatggcagaagcctatagcgagattggtatgaaaggggaacgcagaagaggcaaaggccacgacggactgtaccagggactcagcaccgccaccaaggacacctatgacgctcttcacatgcaggccctgccgcctcgg

SEQ ID NO: 1551 - protein, 248 aa, Artificial Sequence
  Description of Artificial Sequence: Synthetic polypeptide
QVQLVESGGGLVQPGGSLRLSCAASGFTFSSYAMSWVRQAPGKGLEWVSAISGSGGSTYYADSVKGRFTISRDNAKNSLYLQMNSLRAEDTAIYYCARATYKRELRYYYGMDVWGQGTMVTVSSGGGGSGGGGSGGGGSEIVMTQSPGTVSLSPGERATLSCRASQSVSSSFLAWYQQKPGQAPRLLIYGASSRATGIPDRFSGSGSGTDFTLTISRLEPEDSAVYYCQQYHSSPSWTFGQGTRLEIK

SEQ ID NO: 1552 - DNA, 744 bp, Artificial Sequence
  Description of Artificial Sequence: Synthetic polynucleotide
caagtgcagctcgtggaatcgggtggcggactggtgcagccggggggctcacttagactgtcctgcgcggccagcggattcactttctcctcctacgccatgtcctgggtcagacaggcccctggaaagggcctggaatgggtgtccgcaatcagcggcagcggcggctcgacctattacgcggattcagtgaagggcagattcaccatttcccgggacaacgccaagaactccttgtaccttcaaatgaactccctccgcgcggaagataccgcaatctactactgcgctcgggccacttacaagagggaactgcgctactactacgggatggacgtctggggccagggaaccatggtcaccgtgtccagcggaggaggaggatcgggaggaggcggtagcgggggtggagggtcggagatcgtgatgacccagtcccccggcactgtgtcgctgtcccccggcgaacgggccaccctgtcatgtcgggccagccagtcagtgtcgtcaagcttcctcgcctggtaccagcagaaaccgggacaagctccccgcctgctgatctacggagccagcagccgggccaccggtattcctgaccggttctccggttcggggtccgggaccgactttactctgactatctctcgcctcgagccagaggactccgccgtgtattactgccagcagtaccactcctccccgtcctggacgttcggacagggcacaaggctggagattaag

SEQ ID NO: 1553 - protein, 124 aa, Artificial Sequence
  Description of Artificial Sequence: Synthetic polypeptide
QVQLVESGGGLVQPGGSLRLSCAASGFTFSSYAMSWVRQAPGKGLEWVSAISGSGGSTYYADSVKGRFTISRDNAKNSLYLQMNSLRAEDTAIYYCARATYKRELRYYYGMDVWGQGTMVTVSS

SEQ ID NO: 1554 - protein, 109 aa, Artificial Sequence
  Description of Artificial Sequence: Synthetic polypeptide
EIVMTQSPGTVSLSPGERATLSCRASQSVSSSFLAWYQQKPGQAPRLLIYGASSRATGIPDRFSGSGSGTDFTLTISRLEPEDSAVYYCQQYHSSPSWTFGQGTRLEIK

SEQ ID NO: 1555 - protein, 492 aa, Artificial Sequence
  Description of Artificial Sequence: Synthetic polypeptide
MALPVTALLLPLALLLHAARPQVQLVESGGGLVQPGGSLRLSCAASGFTFSSYAMSWVRQAPGKGLEWVSAISGSGGSTYYADSVKGRFTISRDNAKNSLYLQMNSLRAEDTAIYYCARATYKRELRYYYGMDVWGQGTMVTVSSGGGGSGGGGSGGGGSEIVMTQSPGTVSLSPGERATLSCRASQSVSSSFLAWYQQKPGQAPRLLIYGASSRATGIPDRFSGSGSGTDFTLTISRLEPEDSAVYYCQQYHSSPSWTFGQGTRLEIKTTTPAPRPPTPAPTIASQPLSLRPEACRPAAGGAVHTRGLDFACDIYIWAPLAGTCGVLLLSLVITLYCKRGRKKLLYIFKQPFMRPVQTTQEEDGCSCRFPEEEEGGCELRVKFSRSADAPAYKQGQNQLYNELNLGRREEYDVLDKRRGRDPEMGGKPRRKNPQEGLYNELQKDKMAEAYSEIGMKGERRRGKGHDGLYQGLSTATKDTYDALHMQALPPR

SEQ ID NO: 1556 - DNA, 1476 bp, Artificial Sequence
  Description of Artificial Sequence: Synthetic polynucleotide
atggccctccctgtcaccgccctgctgcttccgctggctcttctgctccacgccgctcggccccaagtgcagctcgtggaatcgggtggcggactggtgcagccggggggctcacttagactgtcctgcgcggccagcggattcactttctcctcctacgccatgtcctgggtcagacaggcccctggaaagggcctggaatgggtgtccgcaatcagcggcagcggcggctcgacctattacgcggattcagtgaagggcagattcaccatttcccgggacaacgccaagaactccttgtaccttcaaatgaactccctccgcgcggaagataccgcaatctactactgcgctcgggccacttacaagagggaactgcgctactactacgggatggacgtctggggccagggaaccatggtcaccgtgtccagcggaggaggaggatcgggaggaggcggtagcgggggtggagggtcggagatcgtgatgacccagtcccccggcactgtgtcgctgtcccccggcgaacgggccaccctgtcatgtcgggccagccagtcagtgtcgtcaagcttcctcgcctggtaccagcagaaaccgggacaagctccccgcctgctgatctacggagccagcagccgggccaccggtattcctgaccggttctccggttcggggtccgggaccgactttactctgactatctctcgcctcgagccagaggactccgccgtgtattactgccagcagtaccactcctccccgtcctggacgttcggacagggcacaaggctggagattaagaccactaccccagcaccgaggccacccaccccggctcctaccatcgcctcccagcctctgtccctgcgtccggaggcatgtagacccgcagctggtggggccgtgcatacccggggtcttgacttcgcctgcgatatctacatttgggcccctctggctggtacttgcggggtcctgctgctttcactcgtgatcactctttactgtaagcgcggtcggaagaagctgctgtacatctttaagcaacccttcatgaggcctgtgcagactactcaagaggaggacggctgttcatgccggttcccagaggaggaggaaggcggctgcgaactgcgcgtgaaattcagccgcagcgcagatgctccagcctacaagcaggggcagaaccagctctacaacgaactcaatcttggtcggagagaggagtacgacgtgctggacaagcggagaggacgggacccagaaatgggcgggaagccgcgcagaaagaatccccaagagggcctgtacaacgagctccaaaaggataagatggcagaagcctatagcgagattggtatgaaaggggaacgcagaagaggcaaaggccacgacggactgtaccagggactcagcaccgccaccaaggacacctatgacgctcttcacatgcaggccctgccgcctcgg

SEQ ID NO: 1557 - protein, 248 aa, Artificial Sequence
  Description of Artificial Sequence: Synthetic polypeptide
EVQLVETGGGLVQPGGSLRLSCAASGFTFSSYAMSWVRQAPGKGLEWVSAISGSGGSTYYADSVKGRFTISRDNSKNTLYLQMNTLKAEDTAVYYCARATYKRELRYYYGMDVWGQGTTVTVSSGGGGSGGGGSGGGGSEIVLTQSPSTLSLSPGESATLSCRASQSVSTTFLAWYQQKPGQAPRLLIYGSSNRATGIPDRFSGSGSGTDFTLTIRRLEPEDFAVYYCQQYHSSPSWTFGQGTKVEIK

SEQ ID NO: 1558 - DNA, 744 bp, Artificial Sequence
  Description of Artificial Sequence: Synthetic polynucleotide
gaggtgcagcttgtggaaaccggtggcggactggtgcagcccggaggaagcctcaggctgtcctgcgccgcgtccggcttcaccttctcctcgtacgccatgtcctgggtccgccaggcccccggaaagggcctggaatgggtgtccgccatctctggaagcggaggttccacgtactacgcggacagcgtcaagggaaggttcacaatctcccgcgataattcgaagaacactctgtaccttcaaatgaacaccctgaaggccgaggacactgctgtgtactactgcgcacgggccacctacaagagagagctccggtactactacggaatggacgtctggggccagggaactactgtgaccgtgtcctcgggagggggtggctccggggggggcggctccggcggaggcggttccgagattgtgctgacccagtcaccttcaactctgtcgctgtccccgggagagagcgctactctgagctgccgggccagccagtccgtgtccaccaccttcctcgcctggtatcagcagaagccggggcaggcaccacggctcttgatctacgggtcaagcaacagagcgaccggaattcctgaccgcttctcggggagcggttcaggcaccgacttcaccctgactatccggcgcctggaacccgaagatttcgccgtgtattactgtcaacagtaccactcctcgccgtcctggacctttggccaaggaaccaaagtggaaatcaag

SEQ ID NO: 1559 - protein, 124 aa, Artificial Sequence
  Description of Artificial Sequence: Synthetic polypeptide
EVQLVETGGGLVQPGGSLRLSCAASGFTFSSYAMSWVRQAPGKGLEWVSAISGSGGSTYYADSVKGRFTISRDNSKNTLYLQMNTLKAEDTAVYYCARATYKRELRYYYGMDVWGQGTTVTVSS

SEQ ID NO: 1560 - protein, 109 aa, Artificial Sequence
  Description of Artificial Sequence: Synthetic polypeptide
EIVLTQSPSTLSLSPGESATLSCRASQSVSTTFLAWYQQKPGQAPRLLIYGSSNRATGIPDRFSGSGSGTDFTLTIRRLEPEDFAVYYCQQYHSSPSWTFGQGTKVEIK

SEQ ID NO: 1561 - protein, 492 aa, Artificial Sequence
  Description of Artificial Sequence: Synthetic polypeptide
MALPVTALLLPLALLLHAARPEVQLVETGGGLVQPGGSLRLSCAASGFTFSSYAMSWVRQAPGKGLEWVSAISGSGGSTYYADSVKGRFTISRDNSKNTLYLQMNTLKAEDTAVYYCARATYKRELRYYYGMDVWGQGTTVTVSSGGGGSGGGGSGGGGSEIVLTQSPSTLSLSPGESATLSCRASQSVSTTFLAWYQQKPGQAPRLLIYGSSNRATGIPDRFSGSGSGTDFTLTIRRLEPEDFAVYYCQQYHSSPSWTFGQGTKVEIKTTTPAPRPPTPAPTIASQPLSLRPEACRPAAGGAVHTRGLDFACDIYIWAPLAGTCGVLLLSLVITLYCKRGRKKLLYIFKQPFMRPVQTTQEEDGCSCRFPEEEEGGCELRVKFSRSADAPAYKQGQNQLYNELNLGRREEYDVLDKRRGRDPEMGGKPRRKNPQEGLYNELQKDKMAEAYSEIGMKGERRRGKGHDGLYQGLSTATKDTYDALHMQALPPR

SEQ ID NO: 1562 - DNA, 1476 bp, Artificial Sequence
  Description of Artificial Sequence: Synthetic polynucleotide
atggccctccctgtcaccgccctgctgcttccgctggctcttctgctccacgccgctcggcccgaggtgcagcttgtggaaaccggtggcggactggtgcagcccggaggaagcctcaggctgtcctgcgccgcgtccggcttcaccttctcctcgtacgccatgtcctgggtccgccaggcccccggaaagggcctggaatgggtgtccgccatctctggaagcggaggttccacgtactacgcggacagcgtcaagggaaggttcacaatctcccgcgataattcgaagaacactctgtaccttcaaatgaacaccctgaaggccgaggacactgctgtgtactactgcgcacgggccacctacaagagagagctccggtactactacggaatggacgtctggggccagggaactactgtgaccgtgtcctcgggagggggtggctccggggggggcggctccggcggaggcggttccgagattgtgctgacccagtcaccttcaactctgtcgctgtccccgggagagagcgctactctgagctgccgggccagccagtccgtgtccaccaccttcctcgcctggtatcagcagaagccggggcaggcaccacggctcttgatctacgggtcaagcaacagagcgaccggaattcctgaccgcttctcggggagcggttcaggcaccgacttcaccctgactatccggcgcctggaacccgaagatttcgccgtgtattactgtcaacagtaccactcctcgccgtcctggacctttggccaaggaaccaaagtggaaatcaagaccactaccccagcaccgaggccacccaccccggctcctaccatcgcctcccagcctctgtccctgcgtccggaggcatgtagacccgcagctggtggggccgtgcatacccggggtcttgacttcgcctgcgatatctacatttgggcccctctggctggtacttgcggggtcctgctgctttcactcgtgatcactctttactgtaagcgcggtcggaagaagctgctgtacatctttaagcaacccttcatgaggcctgtgcagactactcaagaggaggacggctgttcatgccggttcccagaggaggaggaaggcggctgcgaactgcgcgtgaaattcagccgcagcgcagatgctccagcctacaagcaggggcagaaccagctctacaacgaactcaatcttggtcggagagaggagtacgacgtgctggacaagcggagaggacgggacccagaaatgggcgggaagccgcgcagaaagaatccccaagagggcctgtacaacgagctccaaaaggataagatggcagaagcctatagcgagattggtatgaaaggggaacgcagaagaggcaaaggccacgacggactgtaccagggactcagcaccgccaccaaggacacctatgacgctcttcacatgcaggccctgccgcctcgg

SEQ ID NO: 1563 - protein, 239 aa, Artificial Sequence
  Description of Artificial Sequence: Synthetic polypeptide
EVQLVETGGGLVQPGRSLRLSCAASGFTFDDYAMHWVRQAPGKGLEWVSGISWNSGSIGYADSVKGRFTISRDNAKNSLYLQMNSLRDEDTAVYYCARVGKAVPDVWGQGTTVTVSSGGGGSGGGGSGGGGSDIVMTQTPSSLSASVGDRVTITCRASQSISSYLNWYQQKPGKAPKLLIYAASSLQSGVPSRFSGSGSGTDFTLTISSLQPEDFATYYCQQSYSTPYSFGQGTRLEIK

SEQ ID NO: 1564 - DNA, 717 bp, Artificial Sequence
  Description of Artificial Sequence: Synthetic polynucleotide
gaagtgcagctcgtggaaactggaggtggactcgtgcagcctggacggtcgctgcggctgagctgcgctgcatccggcttcaccttcgacgattatgccatgcactgggtcagacaggcgccagggaagggacttgagtgggtgtccggtatcagctggaatagcggctcaatcggatacgcggactccgtgaagggaaggttcaccatttcccgcgacaacgccaagaactccctgtacttgcaaatgaacagcctccgggatgaggacactgccgtgtactactgcgcccgcgtcggaaaagctgtgcccgacgtctggggccagggaaccactgtgaccgtgtccagcggcgggggtggatcgggcggtggagggtccggtggagggggctcagatattgtgatgacccagaccccctcgtccctgtccgcctcggtcggcgaccgcgtgactatcacatgtagagcctcgcagagcatctccagctacctgaactggtatcagcagaagccggggaaggccccgaagctcctgatctacgcggcatcatcactgcaatcgggagtgccgagccggttttccgggtccggctccggcaccgacttcacgctgaccatttcttccctgcaacccgaggacttcgccacttactactgccagcagtcctactccaccccttactccttcggccaaggaaccaggctggaaatcaag

SEQ ID NO: 1565 - protein, 117 aa, Artificial Sequence
  Description of Artificial Sequence: Synthetic polypeptide
EVQLVETGGGLVQPGRSLRLSCAASGFTFDDYAMHWVRQAPGKGLEWVSGISWNSGSIGYADSVKGRFTISRDNAKNSLYLQMNSLRDEDTAVYYCARVGKAVPDVWGQGTTVTVSS

SEQ ID NO: 1566 - protein, 107 aa, Artificial Sequence
  Description of Artificial Sequence: Synthetic polypeptide
DIVMTQTPSSLSASVGDRVTITCRASQSISSYLNWYQQKPGKAPKLLIYAASSLQSGVPSRFSGSGSGTDFTLTISSLQPEDFATYYCQQSYSTPYSFGQGTRLEIK

SEQ ID NO: 1567 - protein, 483 aa, Artificial Sequence
  Description of Artificial Sequence: Synthetic polypeptide
MALPVTALLLPLALLLHAARPEVQLVETGGGLVQPGRSLRLSCAASGFTFDDYAMHWVRQAPGKGLEWVSGISWNSGSIGYADSVKGRFTISRDNAKNSLYLQMNSLRDEDTAVYYCARVGKAVPDVWGQGTTVTVSSGGGGSGGGGSGGGGSDIVMTQTPSSLSASVGDRVTITCRASQSISSYLNWYQQKPGKAPKLLIYAASSLQSGVPSRFSGSGSGTDFTLTISSLQPEDFATYYCQQSYSTPYSFGQGTRLEIKTTTPAPRPPTPAPTIASQPLSLRPEACRPAAGGAVHTRGLDFACDIYIWAPLAGTCGVLLLSLVITLYCKRGRKKLLYIFKQPFMRPVQTTQEEDGCSCRFPEEEEGGCELRVKFSRSADAPAYKQGQNQLYNELNLGRREEYDVLDKRRGRDPEMGGKPRRKNPQEGLYNELQKDKMAEAYSEIGMKGERRRGKGHDGLYQGLSTATKDTYDALHMQALPPR

SEQ ID NO: 1568 - DNA, 1449 bp, Artificial Sequence
  Description of Artificial Sequence: Synthetic polynucleotide
atggccctccctgtcaccgccctgctgcttccgctggctcttctgctccacgccgctcggcccgaagtgcagctcgtggaaactggaggtggactcgtgcagcctggacggtcgctgcggctgagctgcgctgcatccggcttcaccttcgacgattatgccatgcactgggtcagacaggcgccagggaagggacttgagtgggtgtccggtatcagctggaatagcggctcaatcggatacgcggactccgtgaagggaaggttcaccatttcccgcgacaacgccaagaactccctgtacttgcaaatgaacagcctccgggatgaggacactgccgtgtactactgcgcccgcgtcggaaaagctgtgcccgacgtctggggccagggaaccactgtgaccgtgtccagcggcgggggtggatcgggcggtggagggtccggtggagggggctcagatattgtgatgacccagaccccctcgtccctgtccgcctcggtcggcgaccgcgtgactatcacatgtagagcctcgcagagcatctccagctacctgaactggtatcagcagaagccggggaaggccccgaagctcctgatctacgcggcatcatcactgcaatcgggagtgccgagccggttttccgggtccggctccggcaccgacttcacgctgaccatttcttccctgcaacccgaggacttcgccacttactactgccagcagtcctactccaccccttactccttcggccaaggaaccaggctggaaatcaagaccactaccccagcaccgaggccacccaccccggctcctaccatcgcctcccagcctctgtccctgcgtccggaggcatgtagacccgcagctggtggggccgtgcatacccggggtcttgacttcgcctgcgatatctacatttgggcccctctggctggtacttgcggggtcctgctgctttcactcgtgatcactctttactgtaagcgcggtcggaagaagctgctgtacatctttaagcaacccttcatgaggcctgtgcagactactcaagaggaggacggctgttcatgccggttcccagaggaggaggaaggcggctgcgaactgcgcgtgaaattcagccgcagcgcagatgctccagcctacaagcaggggcagaaccagctctacaacgaactcaatcttggtcggagagaggagtacgacgtgctggacaagcggagaggacgggacccagaaatgggcgggaagccgcgcagaaagaatccccaagagggcctgtacaacgagctccaaaaggataagatggcagaagcctatagcgagattggtatgaaaggggaacgcagaagaggcaaaggccacgacggactgtaccagggactcagcaccgccaccaaggacacctatgacgctcttcacatgcaggccctgccgcctcgg

SEQ ID NO: 1569 - protein, 246 aa, Artificial Sequence
  Description of Artificial Sequence: Synthetic polypeptide
EVQLVESGGGLVQPGRSLRLSCTASGFTFDDYAMHWVRQRPGKGLEWVASINWKGNSLAYGDSVKGRFAISRDNAKNTVFLQMNSLRTEDTAVYYCASHQGVAYYNYAMDVWGRGTLVTVSSGGGGSGGGGSGGGGSEIVLTQSPGTLSLSPGERATLSCRATQSIGSSFLAWYQQRPGQAPRLLIYGASQRATGIPDRFSGRGSGTDFTLTISRVEPEDSAVYYCQHYESSPSWTFGQGTKVEIK

SEQ ID NO: 1570 - DNA, 738 bp, Artificial Sequence
  Description of Artificial Sequence: Synthetic polynucleotide
gaagtgcagctcgtggagagcgggggaggattggtgcagcccggaaggtccctgcggctctcctgcactgcgtctggcttcaccttcgacgactacgcgatgcactgggtcagacagcgcccgggaaagggcctggaatgggtcgcctcaatcaactggaagggaaactccctggcctatggcgacagcgtgaagggccgcttcgccatttcgcgcgacaacgccaagaacaccgtgtttctgcaaatgaattccctgcggaccgaggataccgctgtgtactactgcgccagccaccagggcgtggcatactataactacgccatggacgtgtggggaagagggacgctcgtcaccgtgtcctccgggggcggtggatcgggtggaggaggaagcggtggcgggggcagcgaaatcgtgctgactcagagcccgggaactctttcactgtccccgggagaacgggccactctctcgtgccgggccacccagtccatcggctcctccttccttgcctggtaccagcagaggccaggacaggcgccccgcctgctgatctacggtgcttcccaacgcgccactggcattcctgaccggttcagcggcagagggtcgggaaccgatttcacactgaccatttcccgggtggagcccgaagattcggcagtctactactgtcagcattacgagtcctccccttcatggaccttcggtcaagggaccaaagtggagatcaag

SEQ ID NO: 1571 - protein, 122 aa, Artificial Sequence
  Description of Artificial Sequence: Synthetic polypeptide
EVQLVESGGGLVQPGRSLRLSCTASGFTFDDYAMHWVRQRPGKGLEWVASINWKGNSLAYGDSVKGRFAISRDNAKNTVFLQMNSLRTEDTAVYYCASHQGVAYYNYAMDVWGRGTLVTVSS

SEQ ID NO: 1572 - protein, 109 aa, Artificial Sequence
  Description of Artificial Sequence: Synthetic polypeptide
EIVLTQSPGTLSLSPGERATLSCRATQSIGSSFLAWYQQRPGQAPRLLIYGASQRATGIPDRFSGRGSGTDFTLTISRVEPEDSAVYYCQHYESSPSWTFGQGTKVEIK

SEQ ID NO: 1573 - protein, 490 aa, Artificial Sequence
  Description of Artificial Sequence: Synthetic polypeptide
MALPVTALLLPLALLLHAARPEVQLVESGGGLVQPGRSLRLSCTASGFTFDDYAMHWVRQRPGKGLEWVASINWKGNSLAYGDSVKGRFAISRDNAKNTVFLQMNSLRTEDTAVYYCASHQGVAYYNYAMDVWGRGTLVTVSSGGGGSGGGGSGGGGSEIVLTQSPGTLSLSPGERATLSCRATQSIGSSFLAWYQQRPGQAPRLLIYGASQRATGIPDRFSGRGSGTDFTLTISRVEPEDSAVYYCQHYESSPSWTFGQGTKVEIKTTTPAPRPPTPAPTIASQPLSLRPEACRPAAGGAVHTRGLDFACDIYIWAPLAGTCGVLLLSLVITLYCKRGRKKLLYIFKQPFMRPVQTTQEEDGCSCRFPEEEEGGCELRVKFSRSADAPAYKQGQNQLYNELNLGRREEYDVLDKRRGRDPEMGGKPRRKNPQEGLYNELQKDKMAEAYSEIGMKGERRRGKGHDGLYQGLSTATKDTYDALHMQALPPR

SEQ ID NO: 1574 - DNA, 1470 bp, Artificial Sequence
  Description of Artificial Sequence: Synthetic polynucleotide
atggccctccctgtcaccgccctgctgcttccgctggctcttctgctccacgccgctcggcccgaagtgcagctcgtggagagcgggggaggattggtgcagcccggaaggtccctgcggctctcctgcactgcgtctggcttcaccttcgacgactacgcgatgcactgggtcagacagcgcccgggaaagggcctggaatgggtcgcctcaatcaactggaagggaaactccctggcctatggcgacagcgtgaagggccgcttcgccatttcgcgcgacaacgccaagaacaccgtgtttctgcaaatgaattccctgcggaccgaggataccgctgtgtactactgcgccagccaccagggcgtggcatactataactacgccatggacgtgtggggaagagggacgctcgtcaccgtgtcctccgggggcggtggatcgggtggaggaggaagcggtggcgggggcagcgaaatcgtgctgactcagagcccgggaactctttcactgtccccgggagaacgggccactctctcgtgccgggccacccagtccatcggctcctccttccttgcctggtaccagcagaggccaggacaggcgccccgcctgctgatctacggtgcttcccaacgcgccactggcattcctgaccggttcagcggcagagggtcgggaaccgatttcacactgaccatttcccgggtggagcccgaagattcggcagtctactactgtcagcattacgagtcctccccttcatggaccttcggtcaagggaccaaagtggagatcaagaccactaccccagcaccgaggccacccaccccggctcctaccatcgcctcccagcctctgtccctgcgtccggaggcatgtagacccgcagctggtggggccgtgcatacccggggtcttgacttcgcctgcgatatctacatttgggcccctctggctggtacttgcggggtcctgctgctttcactcgtgatcactctttactgtaagcgcggtcggaagaagctgctgtacatctttaagcaacccttcatgaggcctgtgcagactactcaagaggaggacggctgttcatgccggttcccagaggaggaggaaggcggctgcgaactgcgcgtgaaattcagccgcagcgcagatgctccagcctacaagcaggggcagaaccagctctacaacgaactcaatcttggtcggagagaggagtacgacgtgctggacaagcggagaggacgggacccagaaatgggcgggaagccgcgcagaaagaatccccaagagggcctgtacaacgagctccaaaaggataagatggcagaagcctatagcgagattggtatgaaaggggaacgcagaagaggcaaaggccacgacggactgtaccagggactcagcaccgccaccaaggacacctatgacgctcttcacatgcaggccctgccgcctcgg

SEQ ID NO: 1575 - protein, 241 aa, Artificial Sequence
  Description of Artificial Sequence: Synthetic polypeptide
EVQLVESGGGLVQPGGSLRLSCAASGFTFSSYAMSWVRQAPGKGLEWVSAISGSGGSTYYADSVKGRFTISRDNSKNTLYLQMNSLRAEDTAVYYCAKVVRDGMDVWGQGTTVTVSSGGGGSGGGGSGGGGSEIVLTQSPATLSLSPGERATLSCRASQSVSSSYLAWYQQKPGQAPRLLIYGASSRATGIPDRFSGNGSGTDFTLTISRLEPEDFAVYYCQQYGSPPRFTFGPGTKVDIK

SEQ ID NO: 1576 - DNA, 723 bp, Artificial Sequence
  Description of Artificial Sequence: Synthetic polynucleotide
gaggtgcagttggtcgaaagcgggggcgggcttgtgcagcctggcggatcactgcggctgtcctgcgcggcatcaggcttcacgttttcttcctacgccatgtcctgggtgcgccaggcccctggaaagggactggaatgggtgtccgcgatttcggggtccggcgggagcacctactacgccgattccgtgaagggccgcttcactatctcgcgggacaactccaagaacaccctctacctccaaatgaatagcctgcgggccgaggataccgccgtctactattgcgctaaggtcgtgcgcgacggaatggacgtgtggggacagggtaccaccgtgacagtgtcctcggggggaggcggtagcggcggaggaggaagcggtggtggaggttccgagattgtgctgactcaatcacccgcgaccctgagcctgtcccccggcgaaagggccactctgtcctgtcgggccagccaatcagtctcctcctcgtacctggcctggtaccagcagaagccaggacaggctccgagactccttatctatggcgcatcctcccgcgccaccggaatcccggataggttctcgggaaacggatcggggaccgacttcactctcaccatctcccggctggaaccggaggacttcgccgtgtactactgccagcagtacggcagcccgcctagattcactttcggccccggcaccaaagtggacatcaag

SEQ ID NO: 1577 - protein, 117 aa, Artificial Sequence
  Description of Artificial Sequence: Synthetic polypeptide
EVQLVESGGGLVQPGGSLRLSCAASGFTFSSYAMSWVRQAPGKGLEWVSAISGSGGSTYYADSVKGRFTISRDNSKNTLYLQMNSLRAEDTAVYYCAKVVRDGMDVWGQGTTVTVSS

SEQ ID NO: 1578 - protein, 109 aa, Artificial Sequence
  Description of Artificial Sequence: Synthetic polypeptide
EIVLTQSPATLSLSPGERATLSCRASQSVSSSYLAWYQQKPGQAPRLLIYGASSRATGIPDRFSGNGSGTDFTLTISRLEPEDFAVYYCQQYGSPPRFTFGPGTKVDIK

SEQ ID NO: 1579 - protein, 485 aa, Artificial Sequence
  Description of Artificial Sequence: Synthetic polypeptide
MALPVTALLLPLALLLHAARPEVQLVESGGGLVQPGGSLRLSCAASGFTFSSYAMSWVRQAPGKGLEWVSAISGSGGSTYYADSVKGRFTISRDNSKNTLYLQMNSLRAEDTAVYYCAKVVRDGMDVWGQGTTVTVSSGGGGSGGGGSGGGGSEIVLTQSPATLSLSPGERATLSCRASQSVSSSYLAWYQQKPGQAPRLLIYGASSRATGIPDRFSGNGSGTDFTLTISRLEPEDFAVYYCQQYGSPPRFTFGPGTKVDIKTTTPAPRPPTPAPTIASQPLSLRPEACRPAAGGAVHTRGLDFACDIYIWAPLAGTCGVLLLSLVITLYCKRGRKKLLYIFKQPFMRPVQTTQEEDGCSCRFPEEEEGGCELRVKFSRSADAPAYKQGQNQLYNELNLGRREEYDVLDKRRGRDPEMGGKPRRKNPQEGLYNELQKDKMAEAYSEIGMKGERRRGKGHDGLYQGLSTATKDTYDALHMQALPPR

SEQ ID NO: 1580 - DNA, 1455 bp, Artificial Sequence
  Description of Artificial Sequence: Synthetic polynucleotide
atggccctccctgtcaccgccctgctgcttccgctggctcttctgctccacgccgctcggcccgaggtgcagttggtcgaaagcgggggcgggcttgtgcagcctggcggatcactgcggctgtcctgcgcggcatcaggcttcacgttttcttcctacgccatgtcctgggtgcgccaggcccctggaaagggactggaatgggtgtccgcgatttcggggtccggcgggagcacctactacgccgattccgtgaagggccgcttcactatctcgcgggacaactccaagaacaccctctacctccaaatgaatagcctgcgggccgaggataccgccgtctactattgcgctaaggtcgtgcgcgacggaatggacgtgtggggacagggtaccaccgtgacagtgtcctcggggggaggcggtagcggcggaggaggaagcggtggtggaggttccgagattgtgctgactcaatcacccgcgaccctgagcctgtcccccggcgaaagggccactctgtcctgtcgggccagccaatcagtctcctcctcgtacctggcctggtaccagcagaagccaggacaggctccgagactccttatctatggcgcatcctcccgcgccaccggaatcccggataggttctcgggaaacggatcggggaccgacttcactctcaccatctcccggctggaaccggaggacttcgccgtgtactactgccagcagtacggcagcccgcctagattcactttcggccccggcaccaaagtggacatcaagaccactaccccagcaccgaggccacccaccccggctcctaccatcgcctcccagcctctgtccctgcgtccggaggcatgtagacccgcagctggtggggccgtgcatacccggggtcttgacttcgcctgcgatatctacatttgggcccctctggctggtacttgcggggtcctgctgctttcactcgtgatcactctttactgtaagcgcggtcggaagaagctgctgtacatctttaagcaacccttcatgaggcctgtgcagactactcaagaggaggacggctgttcatgccggttcccagaggaggaggaaggcggctgcgaactgcgcgtgaaattcagccgcagcgcagatgctccagcctacaagcaggggcagaaccagctctacaacgaactcaatcttggtcggagagaggagtacgacgtgctggacaagcggagaggacgggacccagaaatgggcgggaagccgcgcagaaagaatccccaagagggcctgtacaacgagctccaaaaggataagatggcagaagcctatagcgagattggtatgaaaggggaacgcagaagaggcaaaggccacgacggactgtaccagggactcagcaccgccaccaaggacacctatgacgctcttcacatgcaggccctgccgcctcgg

SEQ ID NO: 1581 - protein, 242 aa, Artificial Sequence
  Description of Artificial Sequence: Synthetic polypeptide
EVQLLESGGGLVQPGGSLRLSCAASGFTFSSYAMSWVRQAPGKGLEWVSAISGSGGSTYYADSVKGRFTISRDNSKNTLYLQMNSLRAEDTAVYYCAKIPQTGTFDYWGQGTLVTVSSGGGGSGGGGSGGGGSEIVLTQSPGTLSLSPGERATLSCRASQSVSSSYLAWYQQRPGQAPRLLIYGASSRATGIPDRFSGSGSGTDFTLTISRLEPEDFAVYYCQHYGSSPSWTFGQGTRLEIK

SEQ ID NO: 1582 - DNA, 726 bp, Artificial Sequence
  Description of Artificial Sequence: Synthetic polynucleotide
gaagtgcagctgctggagtccggcggtggattggtgcaaccggggggatcgctcagactgtcctgtgcggcgtcaggcttcaccttctcgagctacgccatgtcatgggtcagacaggcccctggaaagggtctggaatgggtgtccgccatttccgggagcgggggatctacatactacgccgatagcgtgaagggccgcttcaccatttcccgggacaactccaagaacactctctatctgcaaatgaactccctccgcgctgaggacactgccgtgtactactgcgccaaaatccctcagaccggcaccttcgactactggggacaggggactctggtcaccgtcagcagcggtggcggaggttcggggggaggaggaagcggcggcggagggtccgagattgtgctgacccagtcacccggcactttgtccctgtcgcctggagaaagggccaccctttcctgccgggcatcccaatccgtgtcctcctcgtacctggcctggtaccagcagaggcccggacaggccccacggcttctgatctacggagcaagcagccgcgcgaccggtatcccggaccggttttcgggctcgggctcaggaactgacttcaccctcaccatctcccgcctggaacccgaagatttcgctgtgtattactgccagcactacggcagctccccgtcctggacgttcggccagggaactcggctggagatcaag

SEQ ID NO: 1583 - protein, 118 aa, Artificial Sequence
  Description of Artificial Sequence: Synthetic polypeptide
EVQLLESGGGLVQPGGSLRLSCAASGFTFSSYAMSWVRQAPGKGLEWVSAISGSGGSTYYADSVKGRFTISRDNSKNTLYLQMNSLRAEDTAVYYCAKIPQTGTFDYWGQGTLVTVSS

SEQ ID NO: 1584 - protein, 109 aa, Artificial Sequence
  Description of Artificial Sequence: Synthetic polypeptide
EIVLTQSPGTLSLSPGERATLSCRASQSVSSSYLAWYQQRPGQAPRLLIYGASSRATGIPDRFSGSGSGTDFTLTISRLEPEDFAVYYCQHYGSSPSWTFGQGTRLEIK

SEQ ID NO: 1585 - protein, 486 aa, Artificial Sequence
  Description of Artificial Sequence: Synthetic polypeptide
MALPVTALLLPLALLLHAARPEVQLLESGGGLVQPGGSLRLSCAASGFTFSSYAMSWVRQAPGKGLEWVSAISGSGGSTYYADSVKGRFTISRDNSKNTLYLQMNSLRAEDTAVYYCAKIPQTGTFDYWGQGTLVTVSSGGGGSGGGGSGGGGSEIVLTQSPGTLSLSPGERATLSCRASQSVSSSYLAWYQQRPGQAPRLLIYGASSRATGIPDRFSGSGSGTDFTLTISRLEPEDFAVYYCQHYGSSPSWTFGQGTRLEIKTTTPAPRPPTPAPTIASQPLSLRPEACRPAAGGAVHTRGLDFACDIYIWAPLAGTCGVLLLSLVITLYCKRGRKKLLYIFKQPFMRPVQTTQEEDGCSCRFPEEEEGGCELRVKFSRSADAPAYKQGQNQLYNELNLGRREEYDVLDKRRGRDPEMGGKPRRKNPQEGLYNELQKDKMAEAYSEIGMKGERRRGKGHDGLYQGLSTATKDTYDALHMQALPPR

SEQ ID NO: 1586 - DNA, 1458 bp, Artificial Sequence
  Description of Artificial Sequence: Synthetic polynucleotide
atggccctccctgtcaccgccctgctgcttccgctggctcttctgctccacgccgctcggcccgaagtgcagctgctggagtccggcggtggattggtgcaaccggggggatcgctcagactgtcctgtgcggcgtcaggcttcaccttctcgagctacgccatgtcatgggtcagacaggcccctggaaagggtctggaatgggtgtccgccatttccgggagcgggggatctacatactacgccgatagcgtgaagggccgcttcaccatttcccgggacaactccaagaacactctctatctgcaaatgaactccctccgcgctgaggacactgccgtgtactactgcgccaaaatccctcagaccggcaccttcgactactggggacaggggactctggtcaccgtcagcagcggtggcggaggttcggggggaggaggaagcggcggcggagggtccgagattgtgctgacccagtcacccggcactttgtccctgtcgcctggagaaagggccaccctttcctgccgggcatcccaatccgtgtcctcctcgtacctggcctggtaccagcagaggcccggacaggccccacggcttctgatctacggagcaagcagccgcgcgaccggtatcccggaccggttttcgggctcgggctcaggaactgacttcaccctcaccatctcccgcctggaacccgaagatttcgctgtgtattactgccagcactacggcagctccccgtcctggacgttcggccagggaactcggctggagatcaagaccactaccccagcaccgaggccacccaccccggctcctaccatcgcctcccagcctctgtccctgcgtccggaggcatgtagacccgcagctggtggggccgtgcatacccggggtcttgacttcgcctgcgatatctacatttgggcccctctggctggtacttgcggggtcctgctgctttcactcgtgatcactctttactgtaagcgcggtcggaagaagctgctgtacatctttaagcaacccttcatgaggcctgtgcagactactcaagaggaggacggctgttcatgccggttcccagaggaggaggaaggcggctgcgaactgcgcgtgaaattcagccgcagcgcagatgctccagcctacaagcaggggcagaaccagctctacaacgaactcaatcttggtcggagagaggagtacgacgtgctggacaagcggagaggacgggacccagaaatgggcgggaagccgcgcagaaagaatccccaagagggcctgtacaacgagctccaaaaggataagatggcagaagcctatagcgagattggtatgaaaggggaacgcagaagaggcaaaggccacgacggactgtaccagggactcagcaccgccaccaaggacacctatgacgctcttcacatgcaggccctgccgcctcgg

SEQ ID NO: 1587 - protein, 248 aa, Artificial Sequence
  Description of Artificial Sequence: Synthetic polypeptide
EVQLVETGGGLVQPGGSLRLSCAASGFTFSSYAMSWVRQAPGKGLEWVSAISGSGGSTYYADSVKGRFTMSRENDKNSVFLQMNSLRVEDTGVYYCARANYKRELRYYYGMDVWGQGTMVTVSSGGGGSGGGGSGGGGSEIVMTQSPGTLSLSPGESATLSCRASQRVASNYLAWYQHKPGQAPSLLISGASSRATGVPDRFSGSGSGTDFTLAISRLEPEDSAVYYCQHYDSSPSWTFGQGTKVEIK

SEQ ID NO: 1588 - DNA, 744 bp, Artificial Sequence
  Description of Artificial Sequence: Synthetic polynucleotide
gaagtgcaactggtggaaaccggtggaggactcgtgcagcctggcggcagcctccggctgagctgcgccgcttcgggattcaccttttcctcctacgcgatgtcttgggtcagacaggcccccggaaaggggctggaatgggtgtcagccatctccggctccggcggatcaacgtactacgccgactccgtgaaaggccggttcaccatgtcgcgcgagaatgacaagaactccgtgttcctgcaaatgaactccctgagggtggaggacaccggagtgtactattgtgcgcgcgccaactacaagagagagctgcggtactactacggaatggacgtctggggacagggaactatggtgaccgtgtcatccggtggagggggaagcggcggtggaggcagcgggggcgggggttcagaaattgtcatgacccagtccccgggaactctttccctctcccccggggaatccgcgactttgtcctgccgggccagccagcgcgtggcctcgaactacctcgcatggtaccagcataagccaggccaagccccttccctgctgatttccggggctagcagccgcgccactggcgtgccggataggttctcgggaagcggctcgggtaccgatttcaccctggcaatctcgcggctggaaccggaggattcggccgtgtactactgccagcactatgactcatccccctcctggacattcggacagggcaccaaggtcgagatcaag

SEQ ID NO: 1589 - protein, 124 aa, Artificial Sequence
  Description of Artificial Sequence: Synthetic polypeptide
EVQLVETGGGLVQPGGSLRLSCAASGFTFSSYAMSWVRQAPGKGLEWVSAISGSGGSTYYADSVKGRFTMSRENDKNSVFLQMNSLRVEDTGVYYCARANYKRELRYYYGMDVWGQGTMVTVSS

SEQ ID NO: 1590 - protein, 109 aa, Artificial Sequence
  Description of Artificial Sequence: Synthetic polypeptide
EIVMTQSPGTLSLSPGESATLSCRASQRVASNYLAWYQHKPGQAPSLLISGASSRATGVPDRFSGSGSGTDFTLAISRLEPEDSAVYYCQHYDSSPSWTFGQGTKVEIK

SEQ ID NO: 1591 - protein, 492 aa, Artificial Sequence
  Description of Artificial Sequence: Synthetic polypeptide
MALPVTALLLPLALLLHAARPEVQLVETGGGLVQPGGSLRLSCAASGFTFSSYAMSWVRQAPGKGLEWVSAISGSGGSTYYADSVKGRFTMSRENDKNSVFLQMNSLRVEDTGVYYCARANYKRELRYYYGMDVWGQGTMVTVSSGGGGSGGGGSGGGGSEIVMTQSPGTLSLSPGESATLSCRASQRVASNYLAWYQHKPGQAPSLLISGASSRATGVPDRFSGSGSGTDFTLAISRLEPEDSAVYYCQHYDSSPSWTFGQGTKVEIKTTTPAPRPPTPAPTIASQPLSLRPEACRPAAGGAVHTRGLDFACDIYIWAPLAGTCGVLLLSLVITLYCKRGRKKLLYIFKQPFMRPVQTTQEEDGCSCRFPEEEEGGCELRVKFSRSADAPAYKQGQNQLYNELNLGRREEYDVLDKRRGRDPEMGGKPRRKNPQEGLYNELQKDKMAEAYSEIGMKGERRRGKGHDGLYQGLSTATKDTYDALHMQALPPR

SEQ ID NO: 1592 - DNA, 1476 bp, Artificial Sequence
  Description of Artificial Sequence: Synthetic polynucleotide
atggccctccctgtcaccgccctgctgcttccgctggctcttctgctccacgccgctcggcccgaagtgcaactggtggaaaccggtggaggactcgtgcagcctggcggcagcctccggctgagctgcgccgcttcgggattcaccttttcctcctacgcgatgtcttgggtcagacaggcccccggaaaggggctggaatgggtgtcagccatctccggctccggcggatcaacgtactacgccgactccgtgaaaggccggttcaccatgtcgcgcgagaatgacaagaactccgtgttcctgcaaatgaactccctgagggtggaggacaccggagtgtactattgtgcgcgcgccaactacaagagagagctgcggtactactacggaatggacgtctggggacagggaactatggtgaccgtgtcatccggtggagggggaagcggcggtggaggcagcgggggcgggggttcagaaattgtcatgacccagtccccgggaactctttccctctcccccggggaatccgcgactttgtcctgccgggccagccagcgcgtggcctcgaactacctcgcatggtaccagcataagccaggccaagccccttccctgctgatttccggggctagcagccgcgccactggcgtgccggataggttctcgggaagcggctcgggtaccgatttcaccctggcaatctcgcggctggaaccggaggattcggccgtgtactactgccagcactatgactcatccccctcctggacattcggacagggcaccaaggtcgagatcaagaccactaccccagcaccgaggccacccaccccggctcctaccatcgcctcccagcctctgtccctgcgtccggaggcatgtagacccgcagctggtggggccgtgcatacccggggtcttgacttcgcctgcgatatctacatttgggcccctctggctggtacttgcggggtcctgctgctttcactcgtgatcactctttactgtaagcgcggtcggaagaagctgctgtacatctttaagcaacccttcatgaggcctgtgcagactactcaagaggaggacggctgttcatgccggttcccagaggaggaggaaggcggctgcgaactgcgcgtgaaattcagccgcagcgcagatgctccagcctacaagcaggggcagaaccagctctacaacgaactcaatcttggtcggagagaggagtacgacgtgctggacaagcggagaggacgggacccagaaatgggcgggaagccgcgcagaaagaatccccaagagggcctgtacaacgagctccaaaaggataagatggcagaagcctatagcgagattggtatgaaaggggaacgcagaagaggcaaaggccacgacggactgtaccagggactcagcaccgccaccaaggacacctatgacgctcttcacatgcaggccctgccgcctcgg

SEQ ID NO: 1593 - protein, 244 aa, Artificial Sequence
  Description of Artificial Sequence: Synthetic polypeptide
EVQLLETGGGLVQPGGSLRLSCAASGFSFSSYAMSWVRQAPGKGLEWVSAISGSGGSTYYADSVKGRFTISRDNSKNTLYLQMNSLRAEDTAVYYCAKALVGATGAFDIWGQGTLVTVSSGGGGSGGGGSGGGGSEIVLTQSPGTLSLSPGERATLSCRASQSLSSNFLAWYQQKPGQAPGLLIYGASNWATGTPDRFSGSGSGTDFTLTITRLEPEDFAVYYCQYYGTSPMYTFGQGTKVEIK

SEQ ID NO: 1594 - DNA, 732 bp, Artificial Sequence
  Description of Artificial Sequence: Synthetic polynucleotide
gaagtgcagctgctcgaaaccggtggagggctggtgcagccagggggctccctgaggctttcatgcgccgctagcggattctccttctcctcttacgccatgtcgtgggtccgccaagcccctggaaaaggcctggaatgggtgtccgcgatttccgggagcggaggttcgacctattacgccgactccgtgaagggccgctttaccatctcccgggataactccaagaacactctgtacctccaaatgaactcgctgagagccgaggacaccgccgtgtattactgcgcgaaggcgctggtcggcgcgactggggcattcgacatctggggacagggaactcttgtgaccgtgtcgagcggaggcggcggctccggcggaggagggagcgggggcggtggttccgaaatcgtgttgactcagtccccgggaaccctgagcttgtcacccggggagcgggccactctctcctgtcgcgcctcccaatcgctctcatccaatttcctggcctggtaccagcagaagcccggacaggccccgggcctgctcatctacggcgcttcaaactgggcaacgggaacccctgatcggttcagcggaagcggatcgggtactgactttaccctgaccatcaccagactggaaccggaggacttcgccgtgtactactgccagtactacggcacctcccccatgtacacattcggacagggtaccaaggtcgagattaag

SEQ ID NO: 1595 - protein, 120 aa, Artificial Sequence
  Description of Artificial Sequence: Synthetic polypeptide
EVQLLETGGGLVQPGGSLRLSCAASGFSFSSYAMSWVRQAPGKGLEWVSAISGSGGSTYYADSVKGRFTISRDNSKNTLYLQMNSLRAEDTAVYYCAKALVGATGAFDIWGQGTLVTVSS

SEQ ID NO: 1596 - protein, 109 aa, Artificial Sequence
  Description of Artificial Sequence: Synthetic polypeptide
EIVLTQSPGTLSLSPGERATLSCRASQSLSSNFLAWYQQKPGQAPGLLIYGASNWATGTPDRFSGSGSGTDFTLTITRLEPEDFAVYYCQYYGTSPMYTFGQGTKVEIK

SEQ ID NO: 1597 - protein, 488 aa, Artificial Sequence
  Description of Artificial Sequence: Synthetic polypeptide
MALPVTALLLPLALLLHAARPEVQLLETGGGLVQPGGSLRLSCAASGFSFSSYAMSWVRQAPGKGLEWVSAISGSGGSTYYADSVKGRFTISRDNSKNTLYLQMNSLRAEDTAVYYCAKALVGATGAFDIWGQGTLVTVSSGGGGSGGGGSGGGGSEIVLTQSPGTLSLSPGERATLSCRASQSLSSNFLAWYQQKPGQAPGLLIYGASNWATGTPDRFSGSGSGTDFTLTITRLEPEDFAVYYCQYYGTSPMYTFGQGTKVEIKTTTPAPRPPTPAPTIASQPLSLRPEACRPAAGGAVHTRGLDFACDIYIWAPLAGTCGVLLLSLVITLYCKRGRKKLLYIFKQPFMRPVQTTQEEDGCSCRFPEEEEGGCELRVKFSRSADAPAYKQGQNQLYNELNLGRREEYDVLDKRRGRDPEMGGKPRRKNPQEGLYNELQKDKMAEAYSEIGMKGERRRGKGHDGLYQGLSTATKDTYDALHMQALPPR

SEQ ID NO: 1598 - DNA, 1464 bp, Artificial Sequence
  Description of Artificial Sequence: Synthetic polynucleotide
atggccctccctgtcaccgccctgctgcttccgctggctcttctgctccacgccgctcggcccgaagtgcagctgctcgaaaccggtggagggctggtgcagccagggggctccctgaggctttcatgcgccgctagcggattctccttctcctcttacgccatgtcgtgggtccgccaagcccctggaaaaggcctggaatgggtgtccgcgatttccgggagcggaggttcgacctattacgccgactccgtgaagggccgctttaccatctcccgggataactccaagaacactctgtacctccaaatgaactcgctgagagccgaggacaccgccgtgtattactgcgcgaaggcgctggtcggcgcgactggggcattcgacatctggggacagggaactcttgtgaccgtgtcgagcggaggcggcggctccggcggaggagggagcgggggcggtggttccgaaatcgtgttgactcagtccccgggaaccctgagcttgtcacccggggagcgggccactctctcctgtcgcgcctcccaatcgctctcatccaatttcctggcctggtaccagcagaagcccggacaggccccgggcctgctcatctacggcgcttcaaactgggcaacgggaacccctgatcggttcagcggaagcggatcgggtactgactttaccctgaccatcaccagactggaaccggaggacttcgccgtgtactactgccagtactacggcacctcccccatgtacacattcggacagggtaccaaggtcgagattaagaccactaccccagcaccgaggccacccaccccggctcctaccatcgcctcccagcctctgtccctgcgtccggaggcatgtagacccgcagctggtggggccgtgcatacccggggtcttgacttcgcctgcgatatctacatttgggcccctctggctggtacttgcggggtcctgctgctttcactcgtgatcactctttactgtaagcgcggtcggaagaagctgctgtacatctttaagcaacccttcatgaggcctgtgcagactactcaagaggaggacggctgttcatgccggttcccagaggaggaggaaggcggctgcgaactgcgcgtgaaattcagccgcagcgcagatgctccagcctacaagcaggggcagaaccagctctacaacgaactcaatcttggtcggagagaggagtacgacgtgctggacaagcggagaggacgggacccagaaatgggcgggaagccgcgcagaaagaatccccaagagggcctgtacaacgagctccaaaaggataagatggcagaagcctatagcgagattggtatgaaaggggaacgcagaagaggcaaaggccacgacggactgtaccagggactcagcaccgccaccaaggacacctatgacgctcttcacatgcaggccctgccgcctcgg

SEQ ID NO: 1599 - protein, 244 aa, Artificial Sequence
  Description of Artificial Sequence: Synthetic polypeptide
EVQLLESGGGLVQPGGSLRLSCAASGFTFSSYAMSWVRQAPGKGLEWVSAISGSGGSTYYADSVKGRFTISRDNSKNTLYLQMNSLRAEDTAVYYCVLWFGEGFDPWGQGTLVTVSSGGGGSGGGGSGGGGSDIVLTQSPLSLPVTPGEPASISCRSSQSLLHSNGYNYLDWYLQKPGQSPQLLIYLGSNRASGVPDRFSGSGSGTDFTLKISRVEAEDVGVYYCMQALQTPLTFGGGTKVDIK

SEQ ID NO: 1600 - DNA, 733 bp, Artificial Sequence
  Description of Artificial Sequence: Synthetic polynucleotide
gaagtgcagctgcttgagagcggtggaggtctggtgcagcccgggggatcactgcgcctgtcctgtgccgcgtccggtttcactttctcctcgtacgccatgtcgtgggtcagacaggcaccgggaaagggactggaatgggtgtcagccatttcgggttcggggggcagcacctactacgctgactccgtgaagggccggttcaccatttcccgcgacaactccaagaacaccttgtacctccaaatgaactccctgcgggccgaagataccgccgtgtattactgcgtgctgtggttcggagagggattcgacccgtggggacaaggaacactcgtgactgtgtcatccggcggaggcggcagcggtggcggcggttccggcggcggcggatctgacatcgtgttgacccagtcccctctgagcctgccggtcactcctggcgaaccagccagcatctcctgccggtcgagccagtccctcctgcactccaatgggtacaactacctcgattggtatctgcaaaagccgggccagagcccccagctgctgatctaccttgggtcaaaccgcgcttccggggtgcctgatagattctccgggtccgggagcggaaccgactttaccctgaaaatctcgagggtggaggccgaggacgtcggagtgtactactgcatgcaggcgctccagactcccctgaccttcggaggaggaacgaaggtcgacatcaaga

SEQ ID NO: 1601 - protein, 117 aa, Artificial Sequence
  Description of Artificial Sequence: Synthetic polypeptide
EVQLLESGGGLVQPGGSLRLSCAASGFTFSSYAMSWVRQAPGKGLEWVSAISGSGGSTYYADSVKGRFTISRDNSKNTLYLQMNSLRAEDTAVYYCVLWFGEGFDPWGQGTLVTVSS

SEQ ID NO: 1602 - protein, 112 aa, Artificial Sequence
  Description of Artificial Sequence: Synthetic polypeptide
DIVLTQSPLSLPVTPGEPASISCRSSQSLLHSNGYNYLDWYLQKPGQSPQLLIYLGSNRASGVPDRFSGSGSGTDFTLKISRVEAEDVGVYYCMQALQTPLTFGGGTKVDIK

SEQ ID NO: 1603 - protein, 488 aa, Artificial Sequence
  Description of Artificial Sequence: Synthetic polypeptide
MALPVTALLLPLALLLHAARPEVQLLESGGGLVQPGGSLRLSCAASGFTFSSYAMSWVRQAPGKGLEWVSAISGSGGSTYYADSVKGRFTISRDNSKNTLYLQMNSLRAEDTAVYYCVLWFGEGFDPWGQGTLVTVSSGGGGSGGGGSGGGGSDIVLTQSPLSLPVTPGEPASISCRSSQSLLHSNGYNYLDWYLQKPGQSPQLLIYLGSNRASGVPDRFSGSGSGTDFTLKISRVEAEDVGVYYCMQALQTPLTFGGGTKVDIKTTTPAPRPPTPAPTIASQPLSLRPEACRPAAGGAVHTRGLDFACDIYIWAPLAGTCGVLLLSLVITLYCKRGRKKLLYIFKQPFMRPVQTTQEEDGCSCRFPEEEEGGCELRVKFSRSADAPAYKQGQNQLYNELNLGRREEYDVLDKRRGRDPEMGGKPRRKNPQEGLYNELQKDKMAEAYSEIGMKGERRRGKGHDGLYQGLSTATKDTYDALHMQALPPR

SEQ ID NO: 1604 - DNA, 1464 bp, Artificial Sequence
  Description of Artificial Sequence: Synthetic polynucleotide
atggccctccctgtcaccgccctgctgcttccgctggctcttctgctccacgccgctcggcccgaagtgcagctgcttgagagcggtggaggtctggtgcagcccgggggatcactgcgcctgtcctgtgccgcgtccggtttcactttctcctcgtacgccatgtcgtgggtcagacaggcaccgggaaagggactggaatgggtgtcagccatttcgggttcggggggcagcacctactacgctgactccgtgaagggccggttcaccatttcccgcgacaactccaagaacaccttgtacctccaaatgaactccctgcgggccgaagataccgccgtgtattactgcgtgctgtggttcggagagggattcgacccgtggggacaaggaacactcgtgactgtgtcatccggcggaggcggcagcggtggcggcggttccggcggcggcggatctgacatcgtgttgacccagtcccctctgagcctgccggtcactcctggcgaaccagccagcatctcctgccggtcgagccagtccctcctgcactccaatgggtacaactacctcgattggtatctgcaaaagccgggccagagcccccagctgctgatctaccttgggtcaaaccgcgcttccggggtgcctgatagattctccgggtccgggagcggaaccgactttaccctgaaaatctcgagggtggaggccgaggacgtcggagtgtactactgcatgcaggcgctccagactcccctgaccttcggaggaggaacgaaggtcgacatcaagaccactaccccagcaccgaggccacccaccccggctcctaccatcgcctcccagcctctgtccctgcgtccggaggcatgtagacccgcagctggtggggccgtgcatacccggggtcttgacttcgcctgcgatatctacatttgggcccctctggctggtacttgcggggtcctgctgctttcactcgtgatcactctttactgtaagcgcggtcggaagaagctgctgtacatctttaagcaacccttcatgaggcctgtgcagactactcaagaggaggacggctgttcatgccggttcccagaggaggaggaaggcggctgcgaactgcgcgtgaaattcagccgcagcgcagatgctccagcctacaagcaggggcagaaccagctctacaacgaactcaatcttggtcggagagaggagtacgacgtgctggacaagcggagaggacgggacccagaaatgggcgggaagccgcgcagaaagaatccccaagagggcctgtacaacgagctccaaaaggataagatggcagaagcctatagcgagattggtatgaaaggggaacgcagaagaggcaaaggccacgacggactgtaccagggactcagcaccgccaccaaggacacctatgacgctcttcacatgcaggccctgccgcctcgg

SEQ ID NO: 1605 - protein, 251 aa, Artificial Sequence
  Description of Artificial Sequence: Synthetic polypeptide
QVQLVESGGGLVQPGGSLRLSCAASGFTFSSYAMSWVRQAPGKGLEWVSAISGSGGSTYYADSVKGRFTISRDNSKNTLYLQMNSLRAEDTAVYYCAKVGYDSSGYYRDYYGMDVWGQGTTVTVSSGGGGSGGGGSGGGGSEIVLTQSPGTLSLSPGERATLSCRASQSVSSSYLAWYQQKPGQAPRLLIYGTSSRATGISDRFSGSGSGTDFTLTISRLEPEDFAVYYCQHYGNSPPKFTFGPGTKLEIK

SEQ ID NO: 1606 - DNA, 753 bp, Artificial Sequence
  Description of Artificial Sequence: Synthetic polynucleotide
caagtgcagctcgtggagtcaggcggaggactggtgcagcccgggggctccctgagactttcctgcgcggcatcgggttttaccttctcctcctatgctatgtcctgggtgcgccaggccccgggaaagggactggaatgggtgtccgcaatcagcggtagcgggggctcaacatactacgccgactccgtcaagggtcgcttcactatttcccgggacaactccaagaataccctgtacctccaaatgaacagcctcagggccgaggatactgccgtgtactactgcgccaaagtcggatacgatagctccggttactaccgggactactacggaatggacgtgtggggacagggcaccaccgtgaccgtgtcaagcggcggaggcggttcaggagggggaggctccggcggtggagggtccgaaatcgtcctgactcagtcgcctggcactctgtcgttgtccccgggggagcgcgctaccctgtcgtgtcgggcgtcgcagtccgtgtcgagctcctacctcgcgtggtaccagcagaagcccggacaggcccctagacttctgatctacggcacttcttcacgcgccaccgggatcagcgacaggttcagcggctccggctccgggaccgacttcaccctgaccattagccggctggagcctgaagatttcgccgtgtattactgccaacactacggaaactcgccgccaaagttcacgttcggacccggaaccaagctggaaatcaag

SEQ ID NO: 1607 - protein, 126 aa, Artificial Sequence
  Description of Artificial Sequence: Synthetic polypeptide
QVQLVESGGGLVQPGGSLRLSCAASGFTFSSYAMSWVRQAPGKGLEWVSAISGSGGSTYYADSVKGRFTISRDNSKNTLYLQMNSLRAEDTAVYYCAKVGYDSSGYYRDYYGMDVWGQGTTVTVSS

SEQ ID NO: 1608 - protein, 110 aa, Artificial Sequence
  Description of Artificial Sequence: Synthetic polypeptide
EIVLTQSPGTLSLSPGERATLSCRASQSVSSSYLAWYQQKPGQAPRLLIYGTSSRATGISDRFSGSGSGTDFTLTISRLEPEDFAVYYCQHYGNSPPKFTFGPGTKLEIK

SEQ ID NO: 1609 - protein, 495 aa, Artificial Sequence
  Description of Artificial Sequence: Synthetic polypeptide
MALPVTALLLPLALLLHAARPQVQLVESGGGLVQPGGSLRLSCAASGFTFSSYAMSWVRQAPGKGLEWVSAISGSGGSTYYADSVKGRFTISRDNSKNTLYLQMNSLRAEDTAVYYCAKVGYDSSGYYRDYYGMDVWGQGTTVTVSSGGGGSGGGGSGGGGSEIVLTQSPGTLSLSPGERATLSCRASQSVSSSYLAWYQQKPGQAPRLLIYGTSSRATGISDRFSGSGSGTDFTLTISRLEPEDFAVYYCQHYGNSPPKFTFGPGTKLEIKTTTPAPRPPTPAPTIASQPLSLRPEACRPAAGGAVHTRGLDFACDIYIWAPLAGTCGVLLLSLVITLYCKRGRKKLLYIFKQPFMRPVQTTQEEDGCSCRFPEEEEGGCELRVKFSRSADAPAYKQGQNQLYNELNLGRREEYDVLDKRRGRDPEMGGKPRRKNPQEGLYNELQKDKMAEAYSEIGMKGERRRGKGHDGLYQGLSTATKDTYDALHMQALPPR

SEQ ID NO: 1610 - DNA, 1485 bp, Artificial Sequence
  Description of Artificial Sequence: Synthetic polynucleotide
atggccctccctgtcaccgccctgctgcttccgctggctcttctgctccacgccgctcggccccaagtgcagctcgtggagtcaggcggaggactggtgcagcccgggggctccctgagactttcctgcgcggcatcgggttttaccttctcctcctatgctatgtcctgggtgcgccaggccccgggaaagggactggaatgggtgtccgcaatcagcggtagcgggggctcaacatactacgccgactccgtcaagggtcgcttcactatttcccgggacaactccaagaataccctgtacctccaaatgaacagcctcagggccgaggatactgccgtgtactactgcgccaaagtcggatacgatagctccggttactaccgggactactacggaatggacgtgtggggacagggcaccaccgtgaccgtgtcaagcggcggaggcggttcaggagggggaggctccggcggtggagggtccgaaatcgtcctgactcagtcgcctggcactctgtcgttgtccccgggggagcgcgctaccctgtcgtgtcgggcgtcgcagtccgtgtcgagctcctacctcgcgtggtaccagcagaagcccggacaggcccctagacttctgatctacggcacttcttcacgcgccaccgggatcagcgacaggttcagcggctccggctccgggaccgacttcaccctgaccattagccggctggagcctgaagatttcgccgtgtattactgccaacactacggaaactcgccgccaaagttcacgttcggacccggaaccaagctggaaatcaagaccactaccccagcaccgaggccacccaccccggctcctaccatcgcctcccagcctctgtccctgcgtccggaggcatgtagacccgcagctggtggggccgtgcatacccggggtcttgacttcgcctgcgatatctacatttgggcccctctggctggtacttgcggggtcctgctgctttcactcgtgatcactctttactgtaagcgcggtcggaagaagctgctgtacatctttaagcaacccttcatgaggcctgtgcagactactcaagaggaggacggctgttcatgccggttcccagaggaggaggaaggcggctgcgaactgcgcgtgaaattcagccgcagcgcagatgctccagcctacaagcaggggcagaaccagctctacaacgaactcaatcttggtcggagagaggagtacgacgtgctggacaagcggagaggacgggacccagaaatgggcgggaagccgcgcagaaagaatccccaagagggcctgtacaacgagctccaaaaggataagatggcagaagcctatagcgagattggtatgaaaggggaacgcagaagaggcaaaggccacgacggactgtaccagggactcagcaccgccaccaaggacacctatgacgctcttcacatgcaggccctgccgcctcgg

SEQ ID NO: 1611 - protein, 246 aa, Artificial Sequence
  Description of Artificial Sequence: Synthetic polypeptide
EVQLVESGGGLVQPGGSLRLSCAASGFTFSSYAMSWVRQAPGKGLEWVSAISGSGGSTYYADSVKGRFTISRDNSKNTLYLQMNSLRAEDTAVYYCAKMGWSSGYLGAFDIWGQGTTVTVSSGGGGSGGGGSGGGGSEIVLTQSPGTLSLSPGERATLSCRASQSVASSFLAWYQQKPGQAPRLLIYGASGRATGIPDRFSGSGSGTDFTLTISRLEPEDFAVYYCQHYGGSPRLTFGGGTKVDIK

SEQ ID NO: 1612 - DNA, 739 bp, Artificial Sequence
  Description of Artificial Sequence: Synthetic polynucleotide
gaagtccaactggtggagtccgggggagggctcgtgcagcccggaggcagccttcggctgtcgtgcgccgcctccgggttcacgttctcatcctacgcgatgtcgtgggtcagacaggcaccaggaaagggactggaatgggtgtccgccattagcggctccggcggtagcacctactatgccgactcagtgaagggaaggttcactatctcccgcgacaacagcaagaacaccctgtacctccaaatgaactctctgcgggccgaggataccgcggtgtactattgcgccaagatgggttggtccagcggatacttgggagccttcgacatttggggacagggcactactgtgaccgtgtcctccgggggtggcggatcgggaggcggcggctcgggtggagggggttccgaaatcgtgttgacccagtcaccgggaaccctctcgctgtccccgggagaacgggctacactgtcatgtagagcgtcccagtccgtggcttcctcgttcctggcctggtaccagcagaagccgggacaggcaccccgcctgctcatctacggagccagcggccgggcgaccggcatccctgaccgcttctccggttccggctcgggcaccgactttactctgaccattagcaggcttgagcccgaggattttgccgtgtactactgccaacactacggggggagccctcgcctgaccttcggaggcggaactaaggtcgatatcaaaa

SEQ ID NO: 1613 - protein, 122 aa, Artificial Sequence
  Description of Artificial Sequence: Synthetic polypeptide
EVQLVESGGGLVQPGGSLRLSCAASGFTFSSYAMSWVRQAPGKGLEWVSAISGSGGSTYYADSVKGRFTISRDNSKNTLYLQMNSLRAEDTAVYYCAKMGWSSGYLGAFDIWGQGTTVTVSS

SEQ ID NO: 1614 - protein, 109 aa, Artificial Sequence
  Description of Artificial Sequence: Synthetic polypeptide
EIVLTQSPGTLSLSPGERATLSCRASQSVASSFLAWYQQKPGQAPRLLIYGASGRATGIPDRFSGSGSGTDFTLTISRLEPEDFAVYYCQHYGGSPRLTFGGGTKVDIK

SEQ ID NO: 1615 - protein, 490 aa, Artificial Sequence
  Description of Artificial Sequence: Synthetic polypeptide
MALPVTALLLPLALLLHAARPEVQLVESGGGLVQPGGSLRLSCAASGFTFSSYAMSWVRQAPGKGLEWVSAISGSGGSTYYADSVKGRFTISRDNSKNTLYLQMNSLRAEDTAVYYCAKMGWSSGYLGAFDIWGQGTTVTVSSGGGGSGGGGSGGGGSEIVLTQSPGTLSLSPGERATLSCRASQSVASSFLAWYQQKPGQAPRLLIYGASGRATGIPDRFSGSGSGTDFTLTISRLEPEDFAVYYCQHYGGSPRLTFGGGTKVDIKTTTPAPRPPTPAPTIASQPLSLRPEACRPAAGGAVHTRGLDFACDIYIWAPLAGTCGVLLLSLVITLYCKRGRKKLLYIFKQPFMRPVQTTQEEDGCSCRFPEEEEGGCELRVKFSRSADAPAYKQGQNQLYNELNLGRREEYDVLDKRRGRDPEMGGKPRRKNPQEGLYNELQKDKMAEAYSEIGMKGERRRGKGHDGLYQGLSTATKDTYDALHMQALPPR

SEQ ID NO: 1616 - DNA, 1470 bp, Artificial Sequence
  Description of Artificial Sequence: Synthetic polynucleotide
atggccctccctgtcaccgccctgctgcttccgctggctcttctgctccacgccgctcggcccgaagtccaactggtggagtccgggggagggctcgtgcagcccggaggcagccttcggctgtcgtgcgccgcctccgggttcacgttctcatcctacgcgatgtcgtgggtcagacaggcaccaggaaagggactggaatgggtgtccgccattagcggctccggcggtagcacctactatgccgactcagtgaagggaaggttcactatctcccgcgacaacagcaagaacaccctgtacctccaaatgaactctctgcgggccgaggataccgcggtgtactattgcgccaagatgggttggtccagcggatacttgggagccttcgacatttggggacagggcactactgtgaccgtgtcctccgggggtggcggatcgggaggcggcggctcgggtggagggggttccgaaatcgtgttgacccagtcaccgggaaccctctcgctgtccccgggagaacgggctacactgtcatgtagagcgtcccagtccgtggcttcctcgttcctggcctggtaccagcagaagccgggacaggcaccccgcctgctcatctacggagccagcggccgggcgaccggcatccctgaccgcttctccggttccggctcgggcaccgactttactctgaccattagcaggcttgagcccgaggattttgccgtgtactactgccaacactacggggggagccctcgcctgaccttcggaggcggaactaaggtcgatatcaaaaccactaccccagcaccgaggccacccaccccggctcctaccatcgcctcccagcctctgtccctgcgtccggaggcatgtagacccgcagctggtggggccgtgcatacccggggtcttgacttcgcctgcgatatctacatttgggcccctctggctggtacttgcggggtcctgctgctttcactcgtgatcactctttactgtaagcgcggtcggaagaagctgctgtacatctttaagcaacccttcatgaggcctgtgcagactactcaagaggaggacggctgttcatgccggttcccagaggaggaggaaggcggctgcgaactgcgcgtgaaattcagccgcagcgcagatgctccagcctacaagcaggggcagaaccagctctacaacgaactcaatcttggtcggagagaggagtacgacgtgctggacaagcggagaggacgggacccagaaatgggcgggaagccgcgcagaaagaatccccaagagggcctgtacaacgagctccaaaaggataagatggcagaagcctatagcgagattggtatgaaaggggaacgcagaagaggcaaaggccacgacggactgtaccagggactcagcaccgccaccaaggacacctatgacgctcttcacatgcaggccctgccgcctcgg

SEQ ID NO: 1617 - protein, 122 aa, Artificial Sequence
  Description of Artificial Sequence: Synthetic polypeptide
QIQLVQSGPDLKKPGETVKLSCKASGYTFTNFGMNWVKQAPGKGFKWMAWINTYTGESYFADDFKGRFAFSVETSATTAYLQINNLKTEDTATYFCARGEIYYGYDGGFAYWGQGTLVTVSA

SEQ ID NO: 1618 - protein, 107 aa, Artificial Sequence
  Description of Artificial Sequence: Synthetic polypeptide
DVVMTQSHRFMSTSVGDRVSITCRASQDVNTAVSWYQQKPGQSPKLLIFSASYRYTGVPDRFTGSGSGADFTLTISSVQAEDLAVYYCQQHYSTPWTFGGGTKLDIK

SEQ ID NO: 1619 - protein, 244 aa, Artificial Sequence
  Description of Artificial Sequence: Synthetic polypeptide
QIQLVQSGPDLKKPGETVKLSCKASGYTFTNFGMNWVKQAPGKGFKWMAWINTYTGESYFADDFKGRFAFSVETSATTAYLQINNLKTEDTATYFCARGEIYYGYDGGFAYWGQGTLVTVSAGGGGSGGGGSGGGGSDVVMTQSHRFMSTSVGDRVSITCRASQDVNTAVSWYQQKPGQSPKLLIFSASYRYTGVPDRFTGSGSGADFTLTISSVQAEDLAVYYCQQHYSTPWTFGGGTKLDIK

SEQ ID NO: 1620 - protein, 467 aa, Artificial Sequence
  Description of Artificial Sequence: Synthetic polypeptide
QIQLVQSGPDLKKPGETVKLSCKASGYTFTNFGMNWVKQAPGKGFKWMAWINTYTGESYFADDFKGRFAFSVETSATTAYLQINNLKTEDTATYFCARGEIYYGYDGGFAYWGQGTLVTVSAGGGGSGGGGSGGGGSDVVMTQSHRFMSTSVGDRVSITCRASQDVNTAVSWYQQKPGQSPKLLIFSASYRYTGVPDRFTGSGSGADFTLTISSVQAEDLAVYYCQQHYSTPWTFGGGTKLDIKTTTPAPRPPTPAPTIASQPLSLRPEACRPAAGGAVHTRGLDFACDIYIWAPLAGTCGVLLLSLVITLYCKRGRKKLLYIFKQPFMRPVQTTQEEDGCSCRFPEEEEGGCELRVKFSRSADAPAYKQGQNQLYNELNLGRREEYDVLDKRRGRDPEMGGKPRRKNPQEGLYNELQKDKMAEAYSEIGMKGERRRGKGHDGLYQGLSTATKDTYDALHMQALPPR

SEQ ID NO: 1621 - protein, 117 aa, Artificial Sequence
  Description of Artificial Sequence: Synthetic polypeptide
QIQLVQSGPELKKPGETVKISCKASGYTFTDYSINWVKRAPGKGLKWMGWINTETREPAYAYDFRGRFAFSLETSASTAYLQINNLKYEDTATYFCALDYSYAMDYWGQGTSVTVSS

SEQ ID NO: 1622 - protein, 111 aa, Artificial Sequence
  Description of Artificial Sequence: Synthetic polypeptide
DIVLTQSPASLAMSLGKRATISCRASESVSVIGAHLIHWYQQKPGQPPKLLIYLASNLETGVPARFSGSGSGTDFTLTIDPVEEDDVAIYSCLQSRIFPRTFGGGTKLEIK

SEQ ID NO: 1623 - protein, 249 aa, Artificial Sequence
  Description of Artificial Sequence: Synthetic polypeptide
QIQLVQSGPELKKPGETVKISCKASGYTFTDYSINWVKRAPGKGLKWMGWINTETREPAYAYDFRGRFAFSLETSASTAYLQINNLKYEDTATYFCALDYSYAMDYWGQGTSVTVSSGGGGSGGGGSGGGGSQIQLVQSGPELKKPGETVKISCKASGYTFTDYSINWVKRAPGKGLKWMGWINTETREPAYAYDFRGRFAFSLETSASTAYLQINNLKYEDTATYFCALDYSYAMDYWGQGTSVTVSS

SEQ ID NO: 1624 - protein, 472 aa, Artificial Sequence
  Description of Artificial Sequence: Synthetic polypeptide
QIQLVQSGPELKKPGETVKISCKASGYTFTDYSINWVKRAPGKGLKWMGWINTETREPAYAYDFRGRFAFSLETSASTAYLQINNLKYEDTATYFCALDYSYAMDYWGQGTSVTVSSGGGGSGGGGSGGGGSQIQLVQSGPELKKPGETVKISCKASGYTFTDYSINWVKRAPGKGLKWMGWINTETREPAYAYDFRGRFAFSLETSASTAYLQINNLKYEDTATYFCALDYSYAMDYWGQGTSVTVSSTTTPAPRPPTPAPTIASQPLSLRPEACRPAAGGAVHTRGLDFACDIYIWAPLAGTCGVLLLSLVITLYCKRGRKKLLYIFKQPFMRPVQTTQEEDGCSCRFPEEEEGGCELRVKFSRSADAPAYKQGQNQLYNELNLGRREEYDVLDKRRGRDPEMGGKPRRKNPQEGLYNELQKDKMAEAYSEIGMKGERRRGKGHDGLYQGLSTATKDTYDALHMQALPPR

SEQ ID NO: 1625 - protein, 117 aa, Artificial Sequence
  Description of Artificial Sequence: Synthetic polypeptide
QIQLVQSGPELKKPGETVKISCKASGYTFRHYSMNWVKQAPGKGLKWMGRINTESGVPIYADDFKGRFAFSVETSASTAYLVINNLKDEDTASYFCSNDYLYSLDFWGQGTALTVSS

SEQ ID NO: 1626 - protein, 111 aa, Artificial Sequence
  Description of Artificial Sequence: Synthetic polypeptide
DIVLTQSPPSLAMSLGKRATISCRASESVTILGSHLIYWYQQKPGQPPTLLIQLASNVQTGVPARFSGSGSRTDFTLTIDPVEEDDVAVYYCLQSRTIPRTFGGGTKLEIK

SEQ ID NO: 1627 - protein, 243 aa, Artificial Sequence
  Description of Artificial Sequence: Synthetic polypeptide
QIQLVQSGPELKKPGETVKISCKASGYTFRHYSMNWVKQAPGKGLKWMGRINTESGVPIYADDFKGRFAFSVETSASTAYLVINNLKDEDTASYFCSNDYLYSLDFWGQGTALTVSSGGGGSGGGGSGGGGSDIVLTQSPPSLAMSLGKRATISCRASESVTILGSHLIYWYQQKPGQPPTLLIQLASNVQTGVPARFSGSGSRTDFTLTIDPVEEDDVAVYYCLQSRTIPRTFGGGTKLEIK

SEQ ID NO: 1628 - protein, 466 aa, Artificial Sequence
  Description of Artificial Sequence: Synthetic polypeptide
QIQLVQSGPELKKPGETVKISCKASGYTFRHYSMNWVKQAPGKGLKWMGRINTESGVPIYADDFKGRFAFSVETSASTAYLVINNLKDEDTASYFCSNDYLYSLDFWGQGTALTVSSGGGGSGGGGSGGGGSDIVLTQSPPSLAMSLGKRATISCRASESVTILGSHLIYWYQQKPGQPPTLLIQLASNVQTGVPARFSGSGSRTDFTLTIDPVEEDDVAVYYCLQSRTIPRTFGGGTKLEIKTTTPAPRPPTPAPTIASQPLSLRPEACRPAAGGAVHTRGLDFACDIYIWAPLAGTCGVLLLSLVITLYCKRGRKKLLYIFKQPFMRPVQTTQEEDGCSCRFPEEEEGGCELRVKFSRSADAPAYKQGQNQLYNELNLGRREEYDVLDKRRGRDPEMGGKPRRKNPQEGLYNELQKDKMAEAYSEIGMKGERRRGKGHDGLYQGLSTATKDTYDALHMQALPPR

SEQ ID NO: 1629 - protein, 117 aa, Artificial Sequence
  Description of Artificial Sequence: Synthetic polypeptide
QIQLVQSGPELKKPGETVKISCKASGYTFTHYSMNWVKQAPGKGLKWMGRINTETGEPLYADDFKGRFAFSLETSASTAYLVINNLKNEDTATFFCSNDYLYSCDYWGQGTTLTVSS

SEQ ID NO: 1630 - protein, 111 aa, Artificial Sequence; identical to SEQ ID NO: 1626
  Description of Artificial Sequence: Synthetic polypeptide

SEQ ID NO: 1631 - protein, 243 aa, Artificial Sequence
  Description of Artificial Sequence: Synthetic polypeptide
QIQLVQSGPELKKPGETVKISCKASGYTFTHYSMNWVKQAPGKGLKWMGRINTETGEPLYADDFKGRFAFSLETSASTAYLVINNLKNEDTATFFCSNDYLYSCDYWGQGTTLTVSSGGGGSGGGGSGGGGSDIVLTQSPPSLAMSLGKRATISCRASESVTILGSHLIYWYQQKPGQPPTLLIQLASNVQTGVPARFSGSGSRTDFTLTIDPVEEDDVAVYYCLQSRTIPRTFGGGTKLEIK

SEQ ID NO: 1632 - protein, 466 aa, Artificial Sequence
  Description of Artificial Sequence: Synthetic polypeptide
QIQLVQSGPELKKPGETVKISCKASGYTFTHYSMNWVKQAPGKGLKWMGRINTETGEPLYADDFKGRFAFSLETSASTAYLVINNLKNEDTATFFCSNDYLYSCDYWGQGTTLTVSSGGGGSGGGGSGGGGSDIVLTQSPPSLAMSLGKRATISCRASESVTILGSHLIYWYQQKPGQPPTLLIQLASNVQTGVPARFSGSGSRTDFTLTIDPVEEDDVAVYYCLQSRTIPRTFGGGTKLEIKTTTPAPRPPTPAPTIASQPLSLRPEACRPAAGGAVHTRGLDFACDIYIWAPLAGTCGVLLLSLVITLYCKRGRKKLLYIFKQPFMRPVQTTQEEDGCSCRFPEEEEGGCELRVKFSRSADAPAYKQGQNQLYNELNLGRREEYDVLDKRRGRDPEMGGKPRRKNPQEGLYNELQKDKMAEAYSEIGMKGERRRGKGHDGLYQGLSTATKDTYDALHMQALPPR

SEQ ID NO: 1633 - protein, 465 aa, Artificial Sequence
  Description of Artificial Sequence: Synthetic polypeptide
DIQMTQTTSSLSASLGDRVTISCRASQDISKYLNWYQQKPDGTVKLLIYHTSRLHSGVPSRFSGSGSGTDYSLTISNLEQEDIATYFCQQGNTLPYTFGGGTKLEITGGGGSGGGGSGGGGSEVKLQESGPGLVAPSQSLSVTCTVSGVSLPDYGVSWIRQPPRKGLEWLGVIWGSETTYYNSALKSRLTIIKDNSKSQVFLKMNSLQTDDTAIYYCAKHYYYGGSYAMDYWGQGTSVTVSSTTTPAPRPPTPAPTIASQPLSLRPEACRPAAGGAVHTRGLDFACDIYIWAPLAGTCGVLLLSLVITLYCKRGRKKLLYIFKQPFMRPVQTTQEEDGCSCRFPEEEEGGCELRVKFSRSADAPAYKQGQNQLYNELNLGRREEYDVLDKRRGRDPEMGGKPRRKNPQEGLYNELQKDKMAEAYSEIGMKGERRRGKGHDGLYQGLSTATKDTYDALHMQALPPR

SEQ ID NO: 1634 - protein, 5 aa, Artificial Sequence
  Description of Artificial Sequence: Synthetic peptide
DYGVS

SEQ ID NO: 1635 - protein, 121 aa, Artificial Sequence
  Description of Artificial Sequence: Synthetic polypeptide
QVQLVQSGAEVKKPGSSVKVSCKASGGTFSNYWMHWVRQAPGQGLEWMGATYRGHSDTYYNQKFKGRVTITADKSTSTAYMELSSLRSEDTAVYYCARGAIYDGYDVLDNWGQGTLVTVSS

SEQ ID NO: 1636 - protein, 108 aa, Artificial Sequence
  Description of Artificial Sequence: Synthetic polypeptide
DIQMTQSPSSLSASVGDRVTITCSASQDISNYLNWYQQKPGKAPKLLIYYTSNLHSGVPSRFSGSGSGTDFTLTISSLQPEDFATYYCQQYRKLPWTFGQGTKLEIKR

SEQ ID NO: 1637 - protein, 451 aa, Artificial Sequence
  Description of Artificial Sequence: Synthetic polypeptide
  MOD_RES (451)..(451): Lys or absent
QVQLVQSGAEVKKPGSSVKVSCKASGGTFSNYWMHWVRQAPGQGLEWMGATYRGHSDTYYNQKFKGRVTITADKSTSTAYMELSSLRSEDTAVYYCARGAIYNGYDVLDNWGQGTLVTVSSASTKGPSVFPLAPSSKSTSGGTAALGCLVKDYFPEPVTVSWNSGALTSGVHTFPAVLQSSGLYSLSSVVTVPSSSLGTQTYICNVNHKPSNTKVDKRVEPKSCDKTHTCPPCPAPELLGGPSVFLFPPKPKDTLMISRTPEVTCVVVAVSHEDPEVKFNWYVDGVEVHNAKTKPREEQYNSTYRVVSVLTVLHQDWLNGKEYKCKVSNKALAAPIEKTISKAKGQPREPQVCTLPPSREEMTKNQVSLSCAVKGFYPSDIAVEWESNGQPENNYKTTPPVLDSDGSFFLVSKLTVDKSRWQQGNVFSCSVMHEALHNHYTQKSLSLSPGX

SEQ ID NO: 1638 - protein, 214 aa, Artificial Sequence
  Description of Artificial Sequence: Synthetic polypeptide
DIQMTQSPSSLSASVGDRVTITCSASQDISNYLNWYQQKPGKAPKLLIYYTSNLHSGVPSRFSGSGSGTDFTLTISSLQPEDFATYYCQQYRKLPWTFGQGTKLEIKRTVAAPSVFIFPPSDEQLKSGTASVVCLLNNFYPREAKVQWKVDNALQSGNSQESVTEQDSKDSTYSLSSTLTLSKADYEKHKVYACEVTHQGLSSPVTKSFNRGEC

SEQ ID NO: 1639 - protein, 119 aa, Artificial Sequence
  Description of Artificial Sequence: Synthetic polypeptide
EVQLLESGGGLVQPGGSLRLSCAASGFTFSSYAMSWVRQAPGKGLEWVSAISGSGGSTYYADSVKGRFTISRDNSKNTLYLQMNSLRAEDTAVYYCAKVAPYFAPFDYWGQGTLVTVSS

SEQ ID NO: 1640 - protein, 109 aa, Artificial Sequence
  Description of Artificial Sequence: Synthetic polypeptide
EIVLTQSPGTLSLSPGERATLSCRASQSVSSSYLAWYQQKPGQAPRLLIYGASSRATGIPDRFSGSGSGTDFTLTISRLEPEDFAVYYCQQYGNPPLYTFGQGTKVEIK

SEQ ID NO: 1641 - protein, 449 aa, Artificial Sequence
  Description of Artificial Sequence: Synthetic polypeptide
  MOD_RES (449)..(449): Lys or absent
EVQLLESGGGLVQPGGSLRLSCAASGFTFSSYAMSWVRQAPGKGLEWVSAISGSGGSTYYADSVKGRFTISRDNSKNTLYLQMNSLRAEDTAVYYCAKVAPYFAPFDYWGQGTLVTVSSASTKGPSVFPLAPSSKSTSGGTAALGCLVKDYFPEPVTVSWNSGALTSGVHTFPAVLQSSGLYSLSSVVTVPSSSLGTQTYICNVNHKPSNTKVDKRVEPKSCDKTHTCPPCPAPELLGGPSVFLFPPKPKDTLMISRTPEVTCVVVDVSHEDPEVKFNWYVDGVEVHNAKTKPREEQYASTYRVVSVLTVLHQDWLNGKEYKCKVSNKALPAPIEKTISKAKGQPREPQVCTLPPSREEMTKNQVSLSCAVKGFYPSDIAVEWESNGQPENNYKTTPPVLDSDGSFFLVSKLTVDKSRWQQGNVFSCSVMHEALHNHYTQKSLSLSPGX

SEQ ID NO: 1642 - protein, 216 aa, Artificial Sequence
  Description of Artificial Sequence: Synthetic polypeptide
EIVLTQSPGTLSLSPGERATLSCRASQSVSSSYLAWYQQKPGQAPRLLIYGASSRATGIPDRFSGSGSGTDFTLTISRLEPEDFAVYYCQQYGNPPLYTFGQGTKVEIKRTVAAPSVFIFPPSDEQLKSGTASVVCLLNNFYPREAKVQWKVDNALQSGNSQESVTEQDSKDSTYSLSSTLTLSKADYEKHKVYACEVTHQGLSSPVTKSFNRGEC

SEQ ID NO: 1643 - protein, 117 aa, Artificial Sequence; identical to SEQ ID NO: 1621
  Description of Artificial Sequence: Synthetic polypeptide

SEQ ID NO: 1644 - protein, 111 aa, Artificial Sequence
  Description of Artificial Sequence: Synthetic polypeptide
DIVLTQSPPSLAMSLGKRATISCRASESVTILGSHLIHWYQQKPGQPPTLLIQLASNVQTGVPARFSGSGSRTDFTLTIDPVEEDDVAVYYCLQSRTIPRTFGGGTKLEIK

SEQ ID NO: 1645 - protein, 447 aa, Artificial Sequence
  Description of Artificial Sequence: Synthetic polypeptide
  MOD_RES (447)..(447): Lys or absent
QIQLVQSGPELKKPGETVKISCKASGYTFTDYSINWVKRAPGKGLKWMGWINTETREPAYAYDFRGRFAFSLETSASTAYLQINNLKYEDTATYFCALDYSYAMDYWGQGTSVTVSSASTKGPSVFPLAPSSKSTSGGTAALGCLVKDYFPEPVTVSWNSGALTSGVHTFPAVLQSSGLYSLSSVVTVPSSSLGTQTYICNVNHKPSNTKVDKRVEPKSCDKTHTCPPCPAPELLGGPSVFLFPPKPKDTLMISRTPEVTCVVVDVSHEDPEVKFNWYVDGVEVHNAKTKPREEQYASTYRVVSVLTVLHQDWLNGKEYKCKVSNKALPAPIEKTISKAKGQPREPQVCTLPPSREEMTKNQVSLSCAVKGFYPSDIAVEWESNGQPENNYKTTPPVLDSDGSFFLVSKLTVDKSRWQQGNVFSCSVMHEALHNHYTQKSLSLSPGX

SEQ ID NO: 1646 - protein, 218 aa, Artificial Sequence
  Description of Artificial Sequence: Synthetic polypeptide
DIVLTQSPASLAMSLGKRATISCRASESVSVIGAHLIHWYQQKPGQPPKLLIYLASNLETGVPARFSGSGSGTDFTLTIDPVEEDDVAIYSCLQSRIFPRTFGGGTKLEIKRTVAAPSVFIFPPSDEQLKSGTASVVCLLNNFYPREAKVQWKVDNALQSGNSQESVTEQDSKDSTYSLSSTLTLSKADYEKHKVYACEVTHQGLSSPVTKSFNRGEC

SEQ ID NO: 1647 - protein, 116 aa, Artificial Sequence
  Description of Artificial Sequence: Synthetic polypeptide
EVQLLESGGGLVQPGGSLRLSCAASGFTFSSYAMSWVRQAPGKGLEWVSAISGSGGSTYYADSVKGRFTISRDNSKNTLYLQMNSLRAEDTAVYYCAKVLGWFDYWGQGTLVTVSS

SEQ ID NO: 1648 - protein, 109 aa, Artificial Sequence
  Description of Artificial Sequence: Synthetic polypeptide
EIVLTQSPGTLSLSPGERATLSCRASQSVSSSYLAWYQQKPGQAPRLLIYGASSRATGIPDRFSGSGSGTDFTLTISRLEPEDFAVYYCQQYGYPPDFTFGQGTKVEIK

SEQ ID NO: 1649 - protein, 477 aa, Artificial Sequence
  Description of Artificial Sequence: Synthetic polypeptide
  MOD_RES (477)..(477): Lys or absent
EVQLLESGGGLVQPGGSLRLSCAASGFTFSSYAMSWVRQAPGKGLEWVSAISGSGGSTYYADSVKGRFTISRDNSKNTLYLQMNSLRAEDTAVYYCAKVLGWFDYWGQGTLVTVSSGGGGSGGGGSGGGGSGGGGSEIVLTQSPGTLSLSPGERATLSCRASQSVSSSYLAWYQQKPGQAPRLLIYGASSRATGIPDRFSGSGSGTDFTLTISRLEPEDFAVYYCQQYGYPPDFTFGQGTKVEIKGGGGSDKTHTCPPCPAPELLGGPSVFLFPPKPKDTLMISRTPEVTCVVVAVSHEDPEVKFNWYVDGVEVHNAKTKPREEQYNSTYRVVSVLTVLHQDWLNGKEYKCKVSNKALAAPIEKTISKAKGQPREPQVYTLPPCRDELTKNQVSLWCLVKGFYPSDIAVEWESNGQPENNYKTTPPVLDSDGSFFLYSKLTVDKSRWQQGNVFSCSVMHEALHNHYTQKSLSLSPGX

SEQ ID NO: 1650 - protein, 215 aa, Artificial Sequence
  Description of Artificial Sequence: Synthetic polypeptide
QAVVTQEPSLTVSPGGTVTLTCGSSTGAVTTSNYANWVQEKPGQAFRGLIGGTNKRAPGTPARFSGSLLGGKAALTLSGAQPEDEAEYYCALWYSNLWVFGGGTKLTVLGQPKAAPSVTLFPPSSEELQANKATLVCLISDFYPGAVTVAWKADSSPVKAGVETTTPSKQSNNKYAASSYLSLTPEQWKSHRSYSCQVTHEGSTVEKTVAPTECS

SEQ ID NO: 1651 - protein, 449 aa, Artificial Sequence
  Description of Artificial Sequence: Synthetic polypeptide
  MOD_RES (449)..(449): Lys or absent
EVQLVESGGGLVKPGGSLRLSCAASGFTFSNSGMIWVRQAPGKGLEWVGHIRSKTDGGTTDYAAPVKGRFTISRDDSKNTLYLQMNSLKTEDTAVYYCTTGGSGSFDYWGQGTLVTVSSASTKGPSVFPLAPSSKSTSGGTAALGCLVKDYFPEPVTVSWNSGALTSGVHTFPAVLQSSGLYSLSSVVTVPSSSLGTQTYICNVNHKPSNTKVDKRVEPKSCDKTHTCPPCPAPEAAGGPSVFLFPPKPKDTLMISRTPEVTCVVVDVSHEDPEVKFNWYVDGVEVHNAKTKPREEQYNSTYRVVSVLTVLHQDWLNGKEYKCKVSNKALPAPIEKTISKAKGQPREPQVCTLPPSREEMTKNQVSLSCAVKGFYPSDIAVEWESNGQPENNYKTTPPVLDSDGSFFLVSKLTVDKSRWQQGNVFSCSVMHEALHNHYTQKSLSLSPGX

SEQ ID NO: 1652 - protein, 5 aa, Artificial Sequence
  Description of Artificial Sequence: Synthetic peptide
NHGMS

SEQ ID NO: 1653 - protein, 5 aa, Artificial Sequence
  Description of Artificial Sequence: Synthetic peptide
NYAMS

SEQ ID NO: 1654 - protein, 5 aa, Artificial Sequence
  Description of Artificial Sequence: Synthetic peptide
DYAMH

SEQ ID NO: 1655 - protein, 5 aa, Artificial Sequence
  Description of Artificial Sequence: Synthetic peptide
NHGMS

SEQ ID NO: 1656 - protein, 5 aa, Artificial Sequence
  Description of Artificial Sequence: Synthetic peptide
NFGIN

SEQ ID NO: 1657 - protein, 5 aa, Artificial Sequence
  Description of Artificial Sequence: Synthetic peptide
SDAMT

SEQ ID NO: 1658 - protein, 5 aa, Artificial Sequence
  Description of Artificial Sequence: Synthetic peptide
NYGIT

SEQ ID NO: 1659 - protein, 5 aa, Artificial Sequence
  Description of Artificial Sequence: Synthetic peptide
NHGMS

SEQ ID NO: 1660-1669 - skipped (10 entries)

SEQ ID NO: 1670 - protein, 5 aa, Artificial Sequence
  Description of Artificial Sequence: Synthetic peptide
NHGMS

SEQ ID NO: 1671 - protein, 5 aa, Artificial Sequence
  Description of Artificial Sequence: Synthetic peptide
NHGMS

SEQ ID NO: 1672 - protein, 5 aa, Artificial Sequence
  Description of Artificial Sequence: Synthetic peptide
DYYMS

SEQ ID NO: 1673 - protein, 5 aa, Artificial Sequence
  Description of Artificial Sequence: Synthetic peptide
NHGMS

SEQ ID NO: 1674 - protein, 5 aa, Artificial Sequence
  Description of Artificial Sequence: Synthetic peptide
NHGMS

SEQ ID NO: 1675 - protein, 5 aa, Artificial Sequence
  Description of Artificial Sequence: Synthetic peptide
NHGMS

SEQ ID NO: 1676 - protein, 7 aa, Artificial Sequence
  Description of Artificial Sequence: Synthetic peptide
SSYYYWG

SEQ ID NO: 1677 - protein, 7 aa, Artificial Sequence
  Description of Artificial Sequence: Synthetic peptide
TSGMCVS

SEQ ID NO: 1678 - protein, 5 aa, Artificial Sequence
  Description of Artificial Sequence: Synthetic peptide
SYSMN

SEQ ID NO: 1679 - protein, 5 aa, Artificial Sequence
  Description of Artificial Sequence: Synthetic peptide
DYYMS

SEQ ID NO: 1680 - protein, 5 aa, Artificial Sequence
  Description of Artificial Sequence: Synthetic peptide
SHYIH

SEQ ID NO: 1681 - protein, 7 aa, Artificial Sequence
  Description of Artificial Sequence: Synthetic peptide
SGGYYWS

SEQ ID NO: 1682 - protein, 5 aa, Artificial Sequence
  Description of Artificial Sequence: Synthetic peptide
SYAIS

SEQ ID NO: 1683 - protein, 7 aa, Artificial Sequence
  Description of Artificial Sequence: Synthetic peptide
SNSAAWN

SEQ ID NO: 1684 - protein, 5 aa, Artificial Sequence
  Description of Artificial Sequence: Synthetic peptide
SYAMS

SEQ ID NO: 1685 - protein, 5 aa, Artificial Sequence
  Description of Artificial Sequence: Synthetic peptide
RYPMS

SEQ ID NO: 1686 - protein, 5 aa, Artificial Sequence
  Description of Artificial Sequence: Synthetic peptide
SYAMS

SEQ ID NO: 1687 - protein, 5 aa, Artificial Sequence
  Description of Artificial Sequence: Synthetic peptide
SYAMS

SEQ ID NO: 1688 - protein, 5 aa, Artificial Sequence
  Description of Artificial Sequence: Synthetic peptide
DYAMH

SEQ ID NO: 1689 - protein, 5 aa, Artificial Sequence
  Description of Artificial Sequence: Synthetic peptide
DYAMH

SEQ ID NO: 1690 - protein, 5 aa, Artificial Sequence
  Description of Artificial Sequence: Synthetic peptide
SYAMS

SEQ ID NO: 1691 - protein, 5 aa, Artificial Sequence
  Description of Artificial Sequence: Synthetic peptide
SYAMS

SEQ ID NO: 1692 - protein, 5 aa, Artificial Sequence
  Description of Artificial Sequence: Synthetic peptide
SYAMS

SEQ ID NO: 1693 - protein, 5 aa, Artificial Sequence
  Description of Artificial Sequence: Synthetic peptide
SYAMS

SEQ ID NO: 1694 - protein, 5 aa, Artificial Sequence
  Description of Artificial Sequence: Synthetic peptide
SYAMS

SEQ ID NO: 1695 - protein, 5 aa, Artificial Sequence
  Description of Artificial Sequence: Synthetic peptide
SYAMS

SEQ ID NO: 1696 - protein, 5 aa, Artificial Sequence
  Description of Artificial Sequence: Synthetic peptide
SYAMS

SEQ ID NO: 1697 - protein, 5 aa, Artificial Sequence
  Description of Artificial Sequence: Synthetic peptide
NFGMN

SEQ ID NO: 1698 - protein, 5 aa, Artificial Sequence
  Description of Artificial Sequence: Synthetic peptide
DYSIN

SEQ ID NO: 1699 - protein, 5 aa, Artificial Sequence
  Description of Artificial Sequence: Synthetic peptide
HYSMN

SEQ ID NO: 1700 - protein, 5 aa, Artificial Sequence
  Description of Artificial Sequence: Synthetic peptide
HYSMN

SEQ ID NO: 1701 - protein, 16 aa, Artificial Sequence
  Description of Artificial Sequence: Synthetic peptide
GIVYSGSTYYAASVKG

SEQ ID NO: 1702 - protein, 17 aa, Artificial Sequence
  Description of Artificial Sequence: Synthetic peptide
GISRSGENTYYADSVKG

SEQ ID NO: 1703 - protein, 17 aa, Artificial Sequence
  Description of Artificial Sequence: Synthetic peptide
GISWNSGSIGYADSVKG

SEQ ID NO: 1704 - protein, 16 aa, Artificial Sequence
  Description of Artificial Sequence: Synthetic peptide
GIVYSGSTYYAASVKG

SEQ ID NO: 1705 - protein, 17 aa, Artificial Sequence
  Description of Artificial Sequence: Synthetic peptide
WINPKNNNTNYAQKFQG

SEQ ID NO: 1706 - protein, 17 aa, Artificial Sequence
  Description of Artificial Sequence: Synthetic peptide
VISGSGGTTYYADSVKG

SEQ ID NO: 1707 - protein, 17 aa, Artificial Sequence
  Description of Artificial Sequence: Synthetic peptide
WISAYNGNTNYAQKFQG

SEQ ID NO: 1708 - protein, 16 aa, Artificial Sequence
  Description of Artificial Sequence: Synthetic peptide
GIVYSGSTYYAASVKG

SEQ ID NO: 1709 - protein, 16 aa, Artificial Sequence
  Description of Artificial Sequence: Synthetic peptide
GIVYSGSTYYAASVKG

SEQ ID NO: 1710 - protein, 16 aa, Artificial Sequence
  Description of Artificial Sequence: Synthetic peptide
GIVYSGSTYYAASVKG

SEQ ID NO: 1711 - protein, 17 aa, Artificial Sequence
  Description of Artificial Sequence: Synthetic peptide
YISSSGSTIYYADSVKG

SEQ ID NO: 1712 - protein, 17 aa, Artificial Sequence
  Description of Artificial Sequence: Synthetic peptide
YISSSGNTIYYADSVKG

SEQ ID NO: 1713 - protein, 16 aa, Artificial Sequence
  Description of Artificial Sequence: Synthetic peptide
GIVYSGSTYYAASVKG

SEQ ID NO: 1714 - protein, 16 aa, Artificial Sequence
  Description of Artificial Sequence: Synthetic peptide
GIVYSGSTYYAASVKG

SEQ ID NO: 1715 - protein, 16 aa, Artificial Sequence
  Description of Artificial Sequence: Synthetic peptide
GIVYSGSTYYAASVKG

SEQ ID NO: 1716 - protein, 16 aa, Artificial Sequence
  Description of Artificial Sequence: Synthetic peptide
SIYYSGSAYYNPSLKS

SEQ ID NO: 1717 - protein, 16 aa, Artificial Sequence
  Description of Artificial Sequence: Synthetic peptide
RIDWDEDKFYSTSLKT

SEQ ID NO: 1718 - protein, 17 aa, Artificial Sequence
  Description of Artificial Sequence: Synthetic peptide
SISSSSSYIYYADSVKG

SEQ ID NO: 1719 - protein, 17 aa, Artificial Sequence
  Description of Artificial Sequence: Synthetic peptide
YISSSGSTIYYADSVKG

SEQ ID NO: 1720 - protein, 17 aa, Artificial Sequence
  Description of Artificial Sequence: Synthetic peptide
MINPSGGVTAYSQTLQG

SEQ ID NO: 1721 - protein, 16 aa, Artificial Sequence
  Description of Artificial Sequence: Synthetic peptide
YIYYSGSTYYNPSLKS

SEQ ID NO: 1722 - protein, 17 aa, Artificial Sequence
  Description of Artificial Sequence: Synthetic peptide
GIIPIFGTANYAQKFQG

SEQ ID NO: 1723 - protein, 18 aa, Artificial Sequence
  Description of Artificial Sequence: Synthetic peptide
RTYYRSKWYSFYAISLKS

SEQ ID NO: 1724 - protein, 17 aa, Artificial Sequence
  Description of Artificial Sequence: Synthetic peptide
AISGSGGSTYYADSVKG

SEQ ID NO: 1725 - protein, 17 aa, Artificial Sequence
  Description of Artificial Sequence: Synthetic peptide
GISDSGVSTYYADSAKG

SEQ ID NO: 1726 - protein, 17 aa, Artificial Sequence
  Description of Artificial Sequence: Synthetic peptide
AISGSGGSTYYADSVKG

SEQ ID NO: 1727 - protein, 17 aa, Artificial Sequence
  Description of Artificial Sequence: Synthetic peptide
AISGSGGSTYYADSVKG

SEQ ID NO: 1728 - protein, 17 aa, Artificial Sequence
  Description of Artificial Sequence: Synthetic peptide
GISWNSGSIGYADSVKG

SEQ ID NO: 1729 - protein, 17 aa, Artificial Sequence
  Description of Artificial Sequence: Synthetic peptide
SINWKGNSLAYGDSVKG

SEQ ID NO: 1730 - protein, 17 aa, Artificial Sequence
  Description of Artificial Sequence: Synthetic peptide
AISGSGGSTYYADSVKG

SEQ ID NO: 1731 - protein, 17 aa, Artificial Sequence
  Description of Artificial Sequence: Synthetic peptide
AISGSGGSTYYADSVKG

SEQ ID NO: 1732 - protein, 17 aa, Artificial Sequence
  Description of Artificial Sequence: Synthetic peptide
AISGSGGSTYYADSVKG

SEQ ID NO: 1733 - protein, 17 aa, Artificial Sequence
  Description of Artificial Sequence: Synthetic peptide
AISGSGGSTYYADSVKG

SEQ ID NO: 1734 - protein, 17 aa, Artificial Sequence
  Description of Artificial Sequence: Synthetic peptide
AISGSGGSTYYADSVKG

SEQ ID NO: 1735 - protein, 17 aa, Artificial Sequence
  Description of Artificial Sequence: Synthetic peptide
AISGSGGSTYYADSVKG

SEQ ID NO: 1736 - protein, 17 aa, Artificial Sequence
  Description of Artificial Sequence: Synthetic peptide
AISGSGGSTYYADSVKG

SEQ ID NO: 1737 - protein, 17 aa, Artificial Sequence
  Description of Artificial Sequence: Synthetic peptide
WINTYTGESYFADDFKG

SEQ ID NO: 1738 - protein, 17 aa, Artificial Sequence
  Description of Artificial Sequence: Synthetic peptide
WINTETREPAYAYDFRG

SEQ ID NO: 1739 - protein, 17 aa, Artificial Sequence
  Description of Artificial Sequence: Synthetic peptide
RINTESGVPIYADDFKG

SEQ ID NO: 1740 - protein, 17 aa, Artificial Sequence
  Description of Artificial Sequence: Synthetic peptide
RINTETGEPLYADDFKG

SEQ ID NO: 1741 - protein, 7 aa, Artificial Sequence
  Description of Artificial Sequence: Synthetic peptide
HGGESDV

SEQ ID NO: 1742 - protein, 11 aa, Artificial Sequence
  Description of Artificial Sequence: Synthetic peptide
SPAHYYGGMDV

SEQ ID NO: 1743 - protein, 6 aa, Artificial Sequence
  Description of Artificial Sequence: Synthetic peptide
HSFLAY

SEQ ID NO: 1744 - protein, 7 aa, Artificial Sequence
  Description of Artificial Sequence: Synthetic peptide
HGGESDV

SEQ ID NO: 1745 - protein, 11 aa, Artificial Sequence
  Description of Artificial Sequence: Synthetic peptide
GPYYYQSYMDV

SEQ ID NO: 1746 - protein, 14 aa, Artificial Sequence
  Description of Artificial Sequence: Synthetic peptide
LDSSGYYYARGPRY

SEQ ID NO: 1747 - protein, 9 aa, Artificial Sequence
  Description of Artificial Sequence: Synthetic peptide
GPYYYYMDV

SEQ ID NO: 1748 - protein, 7 aa, Artificial Sequence
  Description of Artificial Sequence: Synthetic peptide
HGGESDV

SEQ ID NO: 1749 - protein, 7 aa, Artificial Sequence
  Description of Artificial Sequence: Synthetic peptide
HGGESDV

SEQ ID NO: 1750 - protein, 7 aa, Artificial Sequence
  Description of Artificial Sequence: Synthetic peptide
HGGESDV

SEQ ID NO: 1751 - protein, 8 aa, Artificial Sequence
  Description of Artificial Sequence: Synthetic peptide
ESGDGMDV

SEQ ID NO: 1752 - protein, 8 aa, Artificial Sequence
  Description of Artificial Sequence: Synthetic peptide
STMVREDY

SEQ ID NO: 1753 - protein, 7 aa, Artificial Sequence
  Description of Artificial Sequence: Synthetic peptide
HGGESDV

SEQ ID NO: 1754 - protein, 7 aa, Artificial Sequence
  Description of Artificial Sequence: Synthetic peptide
HGGESDV

SEQ ID NO: 1755 - protein, 7 aa, Artificial Sequence
  Description of Artificial Sequence: Synthetic peptide
HGGESDV

SEQ ID NO: 1756 - protein, 11 aa, Artificial Sequence
  Description of Artificial Sequence: Synthetic peptide
HWQEWPDAFDI

SEQ ID NO: 1757 - protein, 13 aa, Artificial Sequence
  Description of Artificial Sequence: Synthetic peptide
SGAGGTSATAFDI

SEQ ID NO: 1758 - protein, 10 aa, Artificial Sequence
  Description of Artificial Sequence: Synthetic peptide
TIAAVYAFDI

SEQ ID NO: 1759 - protein, 8 aa, Artificial Sequence
  Description of Artificial Sequence: Synthetic peptide
DLRGAFDI

SEQ ID NO: 1760 - protein, 11 aa, Artificial Sequence
  Description of Artificial Sequence: Synthetic peptide
EGSGSGWYFDF

SEQ ID NO: 1761 - protein, 13 aa, Artificial Sequence
  Description of Artificial Sequence: Synthetic peptide
AGIAARLRGAFDI

SEQ ID NO: 1762 - protein, 20 aa, Artificial Sequence
  Description of Artificial Sequence: Synthetic peptide
RGGYQLLRWDVGLLRSAFDI

SEQ ID NO: 1763 - protein, 13 aa, Artificial Sequence
  Description of Artificial Sequence: Synthetic peptide
SSPEGLFLYWFDP

SEQ ID NO: 1764 - protein, 9 aa, Artificial Sequence
  Description of Artificial Sequence: Synthetic peptide
VEGSGSLDY

SEQ ID NO: 1765 - protein, 9 aa, Artificial Sequence
  Description of Artificial Sequence: Synthetic peptide
RAGSEASDI

SEQ ID NO: 1766 - protein, 15 aa, Artificial Sequence
  Description of Artificial Sequence: Synthetic peptide
ATYKRELRYYYGMDV

SEQ ID NO: 1767 - protein, 15 aa, Artificial Sequence
  Description of Artificial Sequence: Synthetic peptide
ATYKRELRYYYGMDV

SEQ ID NO: 1768 - protein, 8 aa, Artificial Sequence
  Description of Artificial Sequence: Synthetic peptide
VGKAVPDV

SEQ ID NO: 1769 - protein, 13 aa, Artificial Sequence
  Description of Artificial Sequence: Synthetic peptide
HQGVAYYNYAMDV

SEQ ID NO: 1770 - protein, 8 aa, Artificial Sequence
  Description of Artificial Sequence: Synthetic peptide
VVRDGMDV

SEQ ID NO: 1771 - protein, 9 aa, Artificial Sequence
  Description of Artificial Sequence: Synthetic peptide
IPQTGTFDY

SEQ ID NO: 1772 - protein, 15 aa, Artificial Sequence
  Description of Artificial Sequence: Synthetic peptide
ANYKRELRYYYGMDV

SEQ ID NO: 1773 - protein, 11 aa, Artificial Sequence
  Description of Artificial Sequence: Synthetic peptide
ALVGATGAFDI

SEQ ID NO: 1774 - protein, 8 aa, Artificial Sequence
  Description of Artificial Sequence: Synthetic peptide
WFGEGFDP

SEQ ID NO: 1775 - protein, 17 aa, Artificial Sequence
  Description of Artificial Sequence: Synthetic peptide
VGYDSSGYYRDYYGMDV

SEQ ID NO: 1776 - protein, 13 aa, Artificial Sequence
  Description of Artificial Sequence: Synthetic peptide
MGWSSGYLGAFDI

SEQ ID NO: 1777 - protein, 13 aa, Artificial Sequence
  Description of Artificial Sequence: Synthetic peptide
GEIYYGYDGGFAY

SEQ ID NO: 1778 - protein, 8 aa, Artificial Sequence
  Description of Artificial Sequence: Synthetic peptide
DYSYAMDY

SEQ ID NO: 1779 - protein, 8 aa, Artificial Sequence
  Description of Artificial Sequence: Synthetic peptide
DYLYSLDF

SEQ ID NO: 1780-1799 - skipped (20 entries)

SEQ ID NO: 1800 - protein, 8 aa, Artificial Sequence
  Description of Artificial Sequence: Synthetic peptide
DYLYSCDY

SEQ ID NO: 1801-2503 - skipped (703 entries)

SEQ ID NO: 2504 - protein, 12 aa, Artificial Sequence
  Description of Artificial Sequence: Synthetic peptide
RASQSISSSFLA

SEQ ID NO: 2505 - protein, 16 aa, Artificial Sequence
  Description of Artificial Sequence: Synthetic peptide
RSSQSLLHSNGYNYLD

SEQ ID NO: 2506 - protein, 16 aa, Artificial Sequence
  Description of Artificial Sequence: Synthetic peptide
KSSQSLLRNDGKTPLY

SEQ ID NO: 2507 - protein, 16 aa, Artificial Sequence
  Description of Artificial Sequence: Synthetic peptide
RSSQSLLHSNGYNYLN

SEQ ID NO: 2508 - protein, 11 aa, Artificial Sequence
  Description of Artificial Sequence: Synthetic peptide
RASQSISSYLN

SEQ ID NO: 2509 - protein, 16 aa, Artificial Sequence
  Description of Artificial Sequence: Synthetic peptide
RSSQSLLYSNGYNYVD

SEQ ID NO: 2510 - protein, 11 aa, Artificial Sequence
  Description of Artificial Sequence: Synthetic peptide
RASQSVSSNLA

SEQ ID NO: 2511 - protein, 11 aa, Artificial Sequence
  Description of Artificial Sequence: Synthetic peptide
RASQSVSSKLA

SEQ ID NO: 2512 - protein, 12 aa, Artificial Sequence
  Description of Artificial Sequence: Synthetic peptide
RASQSVGSTNLA

SEQ ID NO: 2513 - protein, 11 aa, Artificial Sequence
  Description of Artificial Sequence: Synthetic peptide
RASQSISSYLN

SEQ ID NO: 2514 - protein, 11 aa, Artificial Sequence
  Description of Artificial Sequence: Synthetic peptide
RASQSISSYLN

SEQ ID NO: 2515 - protein, 16 aa, Artificial Sequence
  Description of Artificial Sequence: Synthetic peptide
KSSESLVHNSGKTYLN

SEQ ID NO: 2516 - protein, 11 aa, Artificial Sequence
  Description of Artificial Sequence: Synthetic peptide
QASEDINKFLN

SEQ ID NO: 2517 - protein, 11 aa, Artificial Sequence
  Description of Artificial Sequence: Synthetic peptide
RASQSVGSNLA

SEQ ID NO: 2518 - protein, 12 aa, Artificial Sequence
  Description of Artificial Sequence: Synthetic peptide
RASQSIGSSSLA

SEQ ID NO: 2519 - protein, 11 aa, Artificial Sequence
  Description of Artificial Sequence: Synthetic peptide
KASQDIDDAMN

SEQ ID NO: 2520 - protein, 11 aa, Artificial Sequence
  Description of Artificial Sequence: Synthetic peptide
RASQDIYNNLA

SEQ ID NO: 2521 - protein, 16 aa, Artificial Sequence
  Description of Artificial Sequence: Synthetic peptide
RSSQSLLHSNGYNYLD

SEQ ID NO: 2522 - protein, 11 aa, Artificial Sequence
  Description of Artificial Sequence: Synthetic peptide
GGNNIGTKSVH

SEQ ID NO: 2523 - protein, 11 aa, Artificial Sequence
  Description of Artificial Sequence: Synthetic peptide
SGDGLSKKYVS

SEQ ID NO: 2524 - protein, 11 aa, Artificial Sequence
  Description of Artificial Sequence: Synthetic peptide
RASQGIRNWLA

SEQ ID NO: 2525 - protein, 11 aa, Artificial Sequence
  Description of Artificial Sequence: Synthetic peptide
GGNNIGSKSVH

SEQ ID NO: 2526 - protein, 11 aa, Artificial Sequence
  Description of Artificial Sequence: Synthetic peptide
QGDSLGNYYAT

SEQ ID NO: 2527 - protein, 12 aa, Artificial Sequence
  Description of Artificial Sequence: Synthetic peptide
RASQSVSSAYLA

SEQ ID NO: 2528 - protein, 11 aa, Artificial Sequence
  Description of Artificial Sequence: Synthetic peptide
RASQSVSNSLA

SEQ ID NO: 2529 - protein, 12 aa, Artificial Sequence
  Description of Artificial Sequence: Synthetic peptide
RASQSVSSSFLA

SEQ ID NO: 2530 - protein, 12 aa, Artificial Sequence
  Description of Artificial Sequence: Synthetic peptide
RASQSVSTTFLA

SEQ ID NO: 2531 - protein, 11 aa, Artificial Sequence
  Description of Artificial Sequence: Synthetic peptide
RASQSISSYLN

SEQ ID NO: 2532 - protein, 12 aa, Artificial Sequence
  Description of Artificial Sequence: Synthetic peptide
RATQSIGSSFLA

SEQ ID NO: 2533 - protein, 12 aa, Artificial Sequence
  Description of Artificial Sequence: Synthetic peptide
RASQSVSSSYLA

SEQ ID NO: 2534 - protein, 12 aa, Artificial Sequence
  Description of Artificial Sequence: Synthetic peptide
RASQSVSSSYLA

SEQ ID NO: 2535 - protein, 12 aa, Artificial Sequence
  Description of Artificial Sequence: Synthetic peptide
RASQRVASNYLA

SEQ ID NO: 2536 - protein, 12 aa, Artificial Sequence
  Description of Artificial Sequence: Synthetic peptide
RASQSLSSNFLA

SEQ ID NO: 2537 - protein, 16 aa, Artificial Sequence
  Description of Artificial Sequence: Synthetic peptide
RSSQSLLHSNGYNYLD

SEQ ID NO: 2538 - protein, 12 aa, Artificial Sequence
  Description of Artificial Sequence: Synthetic peptide
RASQSVSSSYLA

SEQ ID NO: 2539 - protein, 12 aa, Artificial Sequence
  Description of Artificial Sequence: Synthetic peptide
RASQSVASSFLA

SEQ ID NO: 2540 - protein, 11 aa, Artificial Sequence
  Description of Artificial Sequence: Synthetic peptide
RASQDVNTAVS

SEQ ID NO: 2541 - protein, 15 aa, Artificial Sequence
  Description of Artificial Sequence: Synthetic peptide
RASESVSVIGAHLIH

SEQ ID NO: 2542 - protein, 15 aa, Artificial Sequence
  Description of Artificial Sequence: Synthetic peptide
RASESVTILGSHLIY

SEQ ID NO: 2543 - protein, 15 aa, Artificial Sequence
  Description of Artificial Sequence: Synthetic peptide
RASESVTILGSHLIY

SEQ ID NO: 2544 - protein, 7 aa, Artificial Sequence
  Description of Artificial Sequence: Synthetic peptide
GASRRAT

SEQ ID NO: 2545 - protein, 7 aa, Artificial Sequence
  Description of Artificial Sequence: Synthetic peptide
LGSNRAS

SEQ ID NO: 2546 - protein, 7 aa, Artificial Sequence
  Description of Artificial Sequence: Synthetic peptide
EVSNRFS

SEQ ID NO: 2547 - protein, 7 aa, Artificial Sequence
  Description of Artificial Sequence: Synthetic peptide
LGSKRAS

SEQ ID NO: 2548 - protein, 7 aa, Artificial Sequence
  Description of Artificial Sequence: Synthetic peptide
GASTLAS

SEQ ID NO: 2549 - protein, 7 aa, Artificial Sequence
  Description of Artificial Sequence: Synthetic peptide
LGSNRAS

SEQ ID NO: 2550 - protein, 7 aa, Artificial Sequence
  Description of Artificial Sequence: Synthetic peptide
GASTRAS

SEQ ID NO: 2551 - protein, 7 aa, Artificial Sequence
  Description of Artificial Sequence: Synthetic peptide
GASIRAT

SEQ ID NO: 2552 - protein, 7 aa, Artificial Sequence
  Description of Artificial Sequence: Synthetic peptide
DASNRAT

SEQ ID NO: 2553 - protein, 7 aa, Artificial Sequence
  Description of Artificial Sequence: Synthetic peptide
AASSLQS

SEQ ID NO: 2554 - protein, 7 aa, Artificial Sequence
  Description of Artificial Sequence: Synthetic peptide
AASSLQS

SEQ ID NO: 2555 - protein, 7 aa, Artificial Sequence
  Description of Artificial Sequence: Synthetic peptide
EVSNRDS

SEQ ID NO: 2556 - protein, 7 aa, Artificial Sequence
  Description of Artificial Sequence: Synthetic peptide
DASTLQT

SEQ ID NO: 2557 - protein, 7 aa, Artificial Sequence
  Description of Artificial Sequence: Synthetic peptide
GASTRAT

SEQ ID NO: 2558 - protein, 7 aa, Artificial Sequence
  Description of Artificial Sequence: Synthetic peptide
GASSRAS

SEQ ID NO: 2559 - protein, 7 aa, Artificial Sequence
  Description of Artificial Sequence: Synthetic peptide
SATSPVP

SEQ ID NO: 2560 - protein, 7 aa, Artificial Sequence
  Description of Artificial Sequence: Synthetic peptide
AANKSQS

SEQ ID NO: 2561 - protein, 7 aa, Artificial Sequence
  Description of Artificial Sequence: Synthetic peptide
LGSNRAS

SEQ ID NO: 2562 - protein, 7 aa, Artificial Sequence
  Description of Artificial Sequence: Synthetic peptide
DDSVRPS

SEQ ID NO: 2563 - protein, 7 aa, Artificial Sequence
  Description of Artificial Sequence: Synthetic peptide
RDKERPS

SEQ ID NO: 2564 - protein, 7 aa, Artificial Sequence
  Description of Artificial Sequence: Synthetic peptide
AASNLQS

SEQ ID NO: 2565 - protein, 7 aa, Artificial Sequence
  Description of Artificial Sequence: Synthetic peptide
GKNNRPS

SEQ ID NO: 2566 - protein, 7 aa, Artificial Sequence
  Description of Artificial Sequence: Synthetic peptide
GTNNRPS

SEQ ID NO: 2567 - protein, 7 aa, Artificial Sequence
  Description of Artificial Sequence: Synthetic peptide
GASTRAT

SEQ ID NO: 2568 - protein, 7 aa, Artificial Sequence
  Description of Artificial Sequence: Synthetic peptide
DASSRAT

SEQ ID NO: 2569 - protein, 7 aa, Artificial Sequence
  Description of Artificial Sequence: Synthetic peptide
GASSRAT

SEQ ID NO: 2570 - protein, 7 aa, Artificial Sequence
  Description of Artificial Sequence: Synthetic peptide
GSSNRAT

SEQ ID NO: 2571 - protein, 7 aa, Artificial Sequence
  Description of Artificial Sequence: Synthetic peptide
AASSLQS

SEQ ID NO: 2572 - protein, 7 aa, Artificial Sequence
  Description of Artificial Sequence: Synthetic peptide
GASQRAT

SEQ ID NO: 2573 - protein, 7 aa, Artificial Sequence
  Description of Artificial Sequence: Synthetic peptide
GASSRAT

SEQ ID NO: 2574 - protein, 7 aa, Artificial Sequence
  Description of Artificial Sequence: Synthetic peptide
GASSRAT

SEQ ID NO: 2575 - protein, 7 aa, Artificial Sequence
  Description of Artificial Sequence: Synthetic peptide
GASSRAT

SEQ ID NO: 2576 - protein, 7 aa, Artificial Sequence
  Description of Artificial Sequence: Synthetic peptide
GASNWAT

SEQ ID NO: 2577 - protein, 7 aa, Artificial Sequence
  Description of Artificial Sequence: Synthetic peptide
LGSNRAS

SEQ ID NO: 2578 - protein, 7 aa, Artificial Sequence
  Description of Artificial Sequence: Synthetic peptide
GTSSRAT

SEQ ID NO: 2579 - protein, 7 aa, Artificial Sequence
  Description of Artificial Sequence: Synthetic peptide
GASGRAT

SEQ ID NO: 2580 - protein, 7 aa, Artificial Sequence
  Description of Artificial Sequence: Synthetic peptide
SASYRYT

SEQ ID NO: 2581 - protein, 7 aa, Artificial Sequence
  Description of Artificial Sequence: Synthetic peptide
LASNLET

SEQ ID NO: 2582 - protein, 7 aa, Artificial Sequence
  Description of Artificial Sequence: Synthetic peptide
LASNVQT

SEQ ID NO: 2583 - protein, 7 aa, Artificial Sequence
  Description of Artificial Sequence: Synthetic peptide
LASNVQT

SEQ ID NO: 2584 - protein, 10 aa, Artificial Sequence
  Description of Artificial Sequence: Synthetic peptide
QQYHSSPSWT

SEQ ID NO: 2585 - protein, 9 aa, Artificial Sequence
  Description of Artificial Sequence: Synthetic peptide
MQALQTPYT

SEQ ID NO: 2586 - protein, 8 aa, Artificial Sequence
  Description of Artificial Sequence: Synthetic peptide
MQNIQFPS

SEQ ID NO: 2587 - protein, 9 aa, Artificial Sequence
  Description of Artificial Sequence: Synthetic peptide
MQALQTPYT

SEQ ID NO: 2588 - protein, 8 aa, Artificial Sequence
  Description of Artificial Sequence: Synthetic peptide
QQSYKRAS

SEQ ID NO: 2589 - protein, 9 aa, Artificial Sequence
  Description of Artificial Sequence: Synthetic peptide
MQGRQFPYS

SEQ ID NO: 2590 - protein, 8 aa, Artificial Sequence
  Description of Artificial Sequence: Synthetic peptide
QQYGSSLT

SEQ ID NO: 2591 - protein, 9 aa, Artificial Sequence
  Description of Artificial Sequence: Synthetic peptide
QQYGSSSWT

SEQ ID NO: 2592 - protein, 10 aa, Artificial Sequence
  Description of Artificial Sequence: Synthetic peptide
QQYGSSPPWT

SEQ ID NO: 2593 - protein, 7 aa, Artificial Sequence
  Description of Artificial Sequence: Synthetic peptide
QQSYTLA

SEQ ID NO: 2594 - protein, 9 aa, Artificial Sequence
  Description of Artificial Sequence: Synthetic peptide
QQSYSTPYT

SEQ ID NO: 2595 - protein, 9 aa, Artificial Sequence
  Description of Artificial Sequence: Synthetic peptide
MQGTHWPGT

SEQ ID NO: 2596 - protein, 9 aa, Artificial Sequence
  Description of Artificial Sequence: Synthetic peptide
QQYESLPLT

SEQ ID NO: 2597 - protein, 10 aa, Artificial Sequence
  Description of Artificial Sequence: Synthetic peptide
QQYNDWLPVT

SEQ ID NO: 2598 - protein, 10 aa, Artificial Sequence
  Description of Artificial Sequence: Synthetic peptide
QQYAGSPPFT

SEQ ID NO: 2599 - protein, 9 aa, Artificial Sequence
  Description of Artificial Sequence: Synthetic peptide
LQHDNFPLT

SEQ ID NO: 2600 - protein, 9 aa, Artificial Sequence
  Description of Artificial Sequence: Synthetic peptide
QHYYRFPYS

SEQ ID NO: 2601 - protein, 9 aa, Artificial Sequence
  Description of Artificial Sequence: Synthetic peptide
MQALQTPYT

SEQ ID NO: 2602 - protein, 11 aa, Artificial Sequence
  Description of Artificial Sequence: Synthetic peptide
QVWDSDSEHVV

SEQ ID NO: 2603 - protein, 9 aa, Artificial Sequence
  Description of Artificial Sequence: Synthetic peptide
QAWDDTTVV

SEQ ID NO: 2604 - protein, 9 aa, Artificial Sequence
  Description of Artificial Sequence: Synthetic peptide
QKYNSAPFT

SEQ ID NO: 2605 - protein, 12 aa, Artificial Sequence
  Description of Artificial Sequence: Synthetic peptide
SSRDSSGDHLRV

SEQ ID NO: 2606 - protein, 11 aa, Artificial Sequence
  Description of Artificial Sequence: Synthetic peptide
NSRDSSGHHLL

SEQ ID NO: 2607 - protein, 14 aa, Artificial Sequence
  Description of Artificial Sequence: Synthetic peptide
QHYGSSFNGSSLFT

SEQ ID NO: 2608 - protein, 10 aa, Artificial Sequence
  Description of Artificial Sequence: Synthetic peptide
QQFGTSSGLT

SEQ ID NO: 2609 - protein, 10 aa, Artificial Sequence
  Description of Artificial Sequence: Synthetic peptide
QQYHSSPSWT

SEQ ID NO: 2610 - protein, 10 aa, Artificial Sequence
  Description of Artificial Sequence: Synthetic peptide
QQYHSSPSWT

SEQ ID NO: 2611 - protein, 9 aa, Artificial Sequence
  Description of Artificial Sequence: Synthetic peptide
QQSYSTPYS

SEQ ID NO: 2612 - protein, 10 aa, Artificial Sequence
  Description of Artificial Sequence: Synthetic peptide
QHYESSPSWT

SEQ ID NO: 2613 - protein, 10 aa, Artificial Sequence
  Description of Artificial Sequence: Synthetic peptide
QQYGSPPRFT

SEQ ID NO: 2614 - protein, 10 aa, Artificial Sequence
  Description of Artificial Sequence: Synthetic peptide
QHYGSSPSWT

SEQ ID NO: 2615 - protein, 10 aa, Artificial Sequence
  Description of Artificial Sequence: Synthetic peptide
QHYDSSPSWT

SEQ ID NO: 2616 - protein, 10 aa, Artificial Sequence
  Description of Artificial Sequence: Synthetic peptide
QYYGTSPMYT

SEQ ID NO: 2617 - protein, 9 aa, Artificial Sequence
  Description of Artificial Sequence: Synthetic peptide
MQALQTPLT

SEQ ID NO: 2618 - protein, 11 aa, Artificial Sequence
  Description of Artificial Sequence: Synthetic peptide
QHYGNSPPKFT

SEQ ID NO: 2619 - protein, 10 aa, Artificial Sequence
  Description of Artificial Sequence: Synthetic peptide
QHYGGSPRLT

SEQ ID NO: 2620 - protein, 9 aa, Artificial Sequence
  Description of Artificial Sequence: Synthetic peptide
QQHYSTPWT

SEQ ID NO: 2621 - protein, 9 aa, Artificial Sequence
  Description of Artificial Sequence: Synthetic peptide
LQSRIFPRT

SEQ ID NO: 2622 - protein, 9 aa, Artificial Sequence
  Description of Artificial Sequence: Synthetic peptide
LQSRTIPRT

SEQ ID NO: 2623 - protein, 9 aa, Artificial Sequence
  Description of Artificial Sequence: Synthetic peptide
LQSRTIPRT

SEQ ID NO: 2624-2863 - skipped (240 entries)

SEQ ID NO: 2864 - protein, 10 aa, Artificial Sequence
  Description of Artificial Sequence: Synthetic peptide
GFTFSNYAMS

SEQ ID NO: 2865 - protein, 10 aa, Artificial Sequence
  Description of Artificial Sequence: Synthetic peptide
GFTFDDYAMH

SEQ ID NO: 2866 - protein, 10 aa, Artificial Sequence
  Description of Artificial Sequence: Synthetic peptide
GFALSNHGMS

SEQ ID NO: 2867 - protein, 10 aa, Artificial Sequence
  Description of Artificial Sequence: Synthetic peptide
GYIFDNFGIN

SEQ ID NO: 2868 - protein, 10 aa, Artificial Sequence
  Description of Artificial Sequence: Synthetic peptide
GFTFSSDAMT

SEQ ID NO: 2869 - protein, 10 aa, Artificial Sequence
  Description of Artificial Sequence: Synthetic peptide
GYTFSNYGIT

SEQ ID NO: 2870 - protein, 10 aa, Artificial Sequence
  Description of Artificial Sequence: Synthetic peptide
GFALSNHGMS

SEQ ID NO: 2871 - protein, 10 aa, Artificial Sequence
  Description of Artificial Sequence: Synthetic peptide
GFALSNHGMS

SEQ ID NO: 2872 - protein, 10 aa, Artificial Sequence
  Description of Artificial Sequence: Synthetic peptide
GFALSNHGMS

SEQ ID NO: 2873 - protein, 10 aa, Artificial Sequence
  Description of Artificial Sequence: Synthetic peptide
GFTFSDYYMS

SEQ ID NO: 2874 - protein, 10 aa, Artificial Sequence
  Description of Artificial Sequence: Synthetic peptide
GFALSNHGMS

SEQ ID NO: 2875 - protein, 10 aa, Artificial Sequence
  Description of Artificial Sequence: Synthetic peptide
GFTFSDYYMS

SEQ ID NO: 2876 - protein, 10 aa, Artificial Sequence
  Description of Artificial Sequence: Synthetic peptide
GFALSNHGMS

SEQ ID NO: 2877 - protein, 10 aa, Artificial Sequence
  Description of Artificial Sequence: Synthetic peptide
GFALSNHGMS

SEQ ID NO: 2878 - protein, 10 aa, Artificial Sequence
  Description of Artificial Sequence: Synthetic peptide
GFALSNHGMS

SEQ ID NO: 2879 - protein, 12 aa, Artificial Sequence
  Description of Artificial Sequence: Synthetic peptide
GGSISSSYYYWG

SEQ ID NO: 2880 - protein, 12 aa, Artificial Sequence
  Description of Artificial Sequence: Synthetic peptide
GFSLRTSGMCVS

SEQ ID NO: 2881 - protein, 10 aa, Artificial Sequence
  Description of Artificial Sequence: Synthetic peptide
GFTFSSYSMN

SEQ ID NO: 2882 - protein, 10 aa, Artificial Sequence
  Description of Artificial Sequence: Synthetic peptide
GFTFSDYYMS

SEQ ID NO: 2883 - protein, 10 aa, Artificial Sequence
  Description of Artificial Sequence: Synthetic peptide
GYTVTSHYIH

SEQ ID NO: 2884 - protein, 12 aa, Artificial Sequence
  Description of Artificial Sequence: Synthetic peptide
GGSISSGGYYWS

SEQ ID NO: 2885 - protein, 10 aa, Artificial Sequence
  Description of Artificial Sequence: Synthetic peptide
GGTFSSYAIS

SEQ ID NO: 2886 - protein, 12 aa, Artificial Sequence
  Description of Artificial Sequence: Synthetic peptide
GDSVSSNSAAWN

SEQ ID NO: 2887 - protein, 10 aa, Artificial Sequence
  Description of Artificial Sequence: Synthetic peptide
GFTFSSYAMS

SEQ ID NO: 2888 - protein, 10 aa, Artificial Sequence
  Description of Artificial Sequence: Synthetic peptide
GITFSRYPMS

SEQ ID NO: 2889 - protein, 10 aa, Artificial Sequence
  Description of Artificial Sequence: Synthetic peptide
GFTFSSYAMS

SEQ ID NO: 2890 - protein, 10 aa, Artificial Sequence
  Description of Artificial Sequence: Synthetic peptide
GFTFSSYAMS

SEQ ID NO: 2891 - protein, 10 aa, Artificial Sequence
  Description of Artificial Sequence: Synthetic peptide
GFTFDDYAMH

SEQ ID NO: 2892 - protein, 10 aa, Artificial Sequence
  Description of Artificial Sequence: Synthetic peptide
GFTFDDYAMH

SEQ ID NO: 2893 - protein, 10 aa, Artificial Sequence
  Description of Artificial Sequence: Synthetic peptide
GFTFSSYAMS

SEQ ID NO: 2894 - protein, 10 aa, Artificial Sequence
  Description of Artificial Sequence: Synthetic peptide
GFTFSSYAMS

SEQ ID NO: 2895 - protein, 10 aa, Artificial Sequence
  Description of Artificial Sequence: Synthetic peptide
GFTFSSYAMS

SEQ ID NO: 2896 - protein, 10 aa, Artificial Sequence
  Description of Artificial Sequence: Synthetic peptide
GFSFSSYAMS

SEQ ID NO: 2897 - protein, 10 aa, Artificial Sequence
  Description of Artificial Sequence: Synthetic peptide
GFTFSSYAMS

SEQ ID NO: 2898 - protein, 10 aa, Artificial Sequence
  Description of Artificial Sequence: Synthetic peptide
GFTFSSYAMS

SEQ ID NO: 2899 - protein, 10 aa, Artificial Sequence
  Description of Artificial Sequence: Synthetic peptide
GFTFSSYAMS

SEQ ID NO: 2900 - protein, 10 aa, Artificial Sequence
  Description of Artificial Sequence: Synthetic peptide
GYTFTNFGMN

SEQ ID NO: 2901 - protein, 10 aa, Artificial Sequence
  Description of Artificial Sequence: Synthetic peptide
GYTFTDYSIN

SEQ ID NO: 2902 - protein, 10 aa, Artificial Sequence
  Description of Artificial Sequence: Synthetic peptide
GYTFRHYSMN

SEQ ID NO: 2903 - protein, 10 aa, Artificial Sequence
  Description of Artificial Sequence: Synthetic peptide
GYTFTHYSMN

SEQ ID NO: 2904 - protein, 17 aa, Artificial Sequence
  Description of Artificial Sequence: Synthetic peptide
GISRSGENTYYADSVKG

SEQ ID NO: 2905 - protein, 17 aa, Artificial Sequence
  Description of Artificial Sequence: Synthetic peptide
GISWNSGSIGYADSVKG

SEQ ID NO: 2906 - protein, 16 aa, Artificial Sequence
  Description of Artificial Sequence: Synthetic peptide
GIVYSGSTYYAASVKG

SEQ ID NO: 2907 - protein, 17 aa, Artificial Sequence
  Description of Artificial Sequence: Synthetic peptide
WINPKNNNTNYAQKFQG

SEQ ID NO: 2908 - protein, 17 aa, Artificial Sequence
  Description of Artificial Sequence: Synthetic peptide
VISGSGGTTYYADSVKG

SEQ ID NO: 2909 - protein, 17 aa, Artificial Sequence
  Description of Artificial Sequence: Synthetic peptide
WISAYNGNTNYAQKFQG

SEQ ID NO: 2910 - protein, 16 aa, Artificial Sequence
  Description of Artificial Sequence: Synthetic peptide
GIVYSGSTYYAASVKG

SEQ ID NO: 2911 - protein, 16 aa, Artificial Sequence
  Description of Artificial Sequence: Synthetic peptide
GIVYSGSTYYAASVKG

SEQ ID NO: 2912 - protein, 16 aa, Artificial Sequence
  Description of Artificial Sequence: Synthetic peptide
GIVYSGSTYYAASVKG

SEQ ID NO: 2913 - protein, 17 aa, Artificial Sequence
  Description of Artificial Sequence: Synthetic peptide
YISSSGSTIYYADSVKG

SEQ ID NO: 2914 - protein, 16 aa, Artificial Sequence
  Description of Artificial Sequence: Synthetic peptide
GIVYSGSTYYAASVKG

SEQ ID NO: 2915 - protein, 17 aa, Artificial Sequence
  Description of Artificial Sequence: Synthetic peptide
YISSSGNTIYYADSVKG

SEQ ID NO: 2916 - protein, 16 aa, Artificial Sequence
  Description of Artificial Sequence: Synthetic peptide
GIVYSGSTYYAASVKG

SEQ ID NO: 2917 - protein, 16 aa, Artificial Sequence
  Description of Artificial Sequence: Synthetic peptide
GIVYSGSTYYAASVKG

SEQ ID NO: 2918 - protein, 16 aa, Artificial Sequence
  Description of Artificial Sequence: Synthetic peptide
GIVYSGSTYYAASVKG

SEQ ID NO: 2919 - protein, 16 aa, Artificial Sequence
  Description of Artificial Sequence: Synthetic peptide
SIYYSGSAYYNPSLKS

SEQ ID NO: 2920 - protein, 16 aa, Artificial Sequence
  Description of Artificial Sequence: Synthetic peptide
RIDWDEDKFYSTSLKT

SEQ ID NO: 2921 - protein, 17 aa, Artificial Sequence
  Description of Artificial Sequence: Synthetic peptide
SISSSSSYIYYADSVKG

SEQ ID NO: 2922 - protein, 17 aa, Artificial Sequence
  Description of Artificial Sequence: Synthetic peptide
YISSSGSTIYYADSVKG

SEQ ID NO: 2923 - protein, 17 aa, Artificial Sequence
  Description of Artificial Sequence: Synthetic peptide
MINPSGGVTAYSQTLQG

SEQ ID NO: 2924 - protein, 16 aa, Artificial Sequence
  Description of Artificial Sequence: Synthetic peptide
YIYYSGSTYYNPSLKS

SEQ ID NO: 2925 - protein, 17 aa, Artificial Sequence
  Description of Artificial Sequence: Synthetic peptide
GIIPIFGTANYAQKFQG

SEQ ID NO: 2926 - protein, 18 aa, Artificial Sequence
  Description of Artificial Sequence: Synthetic peptide
RTYYRSKWYSFYAISLKS

SEQ ID NO: 2927 - protein, 17 aa, Artificial Sequence
  Description of Artificial Sequence: Synthetic peptide
AISGSGGSTYYADSVKG

SEQ ID NO: 2928 - protein, 17 aa, Artificial Sequence
  Description of Artificial Sequence: Synthetic peptide
GISDSGVSTYYADSAKG

SEQ ID NO: 2929 - protein, 17 aa, Artificial Sequence
  Description of Artificial Sequence: Synthetic peptide
AISGSGGSTYYADSVKG

SEQ ID NO: 2930 - protein, 17 aa, Artificial Sequence
  Description of Artificial Sequence: Synthetic peptide
AISGSGGSTYYADSVKG

SEQ ID NO: 2931 - protein, 17 aa, Artificial Sequence
  Description of Artificial Sequence: Synthetic peptide
GISWNSGSIGYADSVKG

SEQ ID NO: 2932 - protein, 17 aa, Artificial Sequence
  Description of Artificial Sequence: Synthetic peptide
SINWKGNSLAYGDSVKG

SEQ ID NO: 2933 - protein, 17 aa, Artificial Sequence
  Description of Artificial Sequence: Synthetic peptide
AISGSGGSTYYADSVKG

SEQ ID NO: 2934 - protein, 17 aa, Artificial Sequence
  Description of Artificial Sequence: Synthetic peptide
AISGSGGSTYYADSVKG

SEQ ID NO: 2935 - protein, 17 aa, Artificial Sequence
  Description of Artificial Sequence: Synthetic peptide
AISGSGGSTYYADSVKG

SEQ ID NO: 2936 - protein, 17 aa, Artificial Sequence
  Description of Artificial Sequence: Synthetic peptide
AISGSGGSTYYADSVKG

SEQ ID NO: 2937 - protein, 17 aa, Artificial Sequence
  Description of Artificial Sequence: Synthetic peptide
AISGSGGSTYYADSVKG

SEQ ID NO: 2938 - protein, 17 aa, Artificial Sequence
  Description of Artificial Sequence: Synthetic peptide
AISGSGGSTYYADSVKG

SEQ ID NO: 2939 - protein, 17 aa, Artificial Sequence
  Description of Artificial Sequence: Synthetic peptide
AISGSGGSTYYADSVKG

SEQ ID NO: 2940 - protein, 17 aa, Artificial Sequence
  Description of Artificial Sequence: Synthetic peptide
WINTYTGESYFADDFKG

SEQ ID NO: 2941 - protein, 17 aa, Artificial Sequence
  Description of Artificial Sequence: Synthetic peptide
WINTETREPAYAYDFRG

SEQ ID NO: 2942 - protein, 17 aa, Artificial Sequence
  Description of Artificial Sequence: Synthetic peptide
RINTESGVPIYADDFKG

SEQ ID NO: 2943 - protein, 17 aa, Artificial Sequence
  Description of Artificial Sequence: Synthetic peptide
RINTETGEPLYADDFKG

SEQ ID NO: 2944 - protein, 11 aa, Artificial Sequence
  Description of Artificial Sequence: Synthetic peptide
SPAHYYGGMDV

SEQ ID NO: 2945 - protein, 6 aa, Artificial Sequence
  Description of Artificial Sequence: Synthetic peptide
HSFLAY

SEQ ID NO: 2946 - protein, 7 aa, Artificial Sequence
  Description of Artificial Sequence: Synthetic peptide
HGGESDV

SEQ ID NO: 2947 - protein, 11 aa, Artificial Sequence
  Description of Artificial Sequence: Synthetic peptide
GPYYYQSYMDV

SEQ ID NO: 2948 - protein, 14 aa, Artificial Sequence
  Description of Artificial Sequence: Synthetic peptide
LDSSGYYYARGPRY

SEQ ID NO: 2949 - protein, 9 aa, Artificial Sequence
  Description of Artificial Sequence: Synthetic peptide
GPYYYYMDV

SEQ ID NO: 2950 - protein, 7 aa, Artificial Sequence
  Description of Artificial Sequence: Synthetic peptide
HGGESDV

SEQ ID NO: 2951 - protein, 7 aa, Artificial Sequence
  Description of Artificial Sequence: Synthetic peptide
HGGESDV

SEQ ID NO: 2952 - protein, 7 aa, Artificial Sequence
  Description of Artificial Sequence: Synthetic peptide
HGGESDV

SEQ ID NO: 2953 - protein, 8 aa, Artificial Sequence
  Description of Artificial Sequence: Synthetic peptide
ESGDGMDV

SEQ ID NO: 2954 - protein, 7 aa, Artificial Sequence
  Description of Artificial Sequence: Synthetic peptide
HGGESDV

SEQ ID NO: 2955 - protein, 8 aa, Artificial Sequence
  Description of Artificial Sequence: Synthetic peptide
STMVREDY

SEQ ID NO: 2956 - protein, 7 aa, Artificial Sequence
  Description of Artificial Sequence: Synthetic peptide
HGGESDV

SEQ ID NO: 2957 - protein, 7 aa, Artificial Sequence
  Description of Artificial Sequence: Synthetic peptide
HGGESDV

SEQ ID NO: 2958 - protein, 7 aa, Artificial Sequence
  Description of Artificial Sequence: Synthetic peptide
HGGESDV

SEQ ID NO: 2959 - protein, 11 aa, Artificial Sequence
  Description of Artificial Sequence: Synthetic peptide
HWQEWPDAFDI

SEQ ID NO: 2960 - protein, 13 aa, Artificial Sequence
  Description of Artificial Sequence: Synthetic peptide
SGAGGTSATAFDI

SEQ ID NO: 2961 - protein, 10 aa, Artificial Sequence
  Description of Artificial Sequence: Synthetic peptide
TIAAVYAFDI

SEQ ID NO: 2962 - protein, 8 aa, Artificial Sequence
  Description of Artificial Sequence: Synthetic peptide
DLRGAFDI

SEQ ID NO: 2963 - protein, 11 aa, Artificial Sequence
  Description of Artificial Sequence: Synthetic peptide
EGSGSGWYFDF

SEQ ID NO: 2964 - protein, 13 aa, Artificial Sequence
  Description of Artificial Sequence: Synthetic peptide
AGIAARLRGAFDI

SEQ ID NO: 2965 - protein, 20 aa, Artificial Sequence
  Description of Artificial Sequence: Synthetic peptide
RGGYQLLRWDVGLLRSAFDI

SEQ ID NO: 2966 - protein, 13 aa, Artificial Sequence
  Description of Artificial Sequence: Synthetic peptide
SSPEGLFLYWFDP

SEQ ID NO: 2967 - protein, 9 aa, Artificial Sequence
  Description of Artificial Sequence: Synthetic peptide
VEGSGSLDY

SEQ ID NO: 2968 - protein, 9 aa, Artificial Sequence
  Description of Artificial Sequence: Synthetic peptide
RAGSEASDI

SEQ ID NO: 2969 - protein, 15 aa, Artificial Sequence
  Description of Artificial Sequence: Synthetic peptide
ATYKRELRYYYGMDV

SEQ ID NO: 2970 - protein, 15 aa, Artificial Sequence
  Description of Artificial Sequence: Synthetic peptide
ATYKRELRYYYGMDV

SEQ ID NO: 2971 - protein, 8 aa, Artificial Sequence
  Description of Artificial Sequence: Synthetic peptide
VGKAVPDV

SEQ ID NO: 2972 - protein, 13 aa, Artificial Sequence
  Description of Artificial Sequence: Synthetic peptide
HQGVAYYNYAMDV

SEQ ID NO: 2973 - protein, 8 aa, Artificial Sequence
  Description of Artificial Sequence: Synthetic peptide
VVRDGMDV

SEQ ID NO: 2974 - protein, 9 aa, Artificial Sequence
  Description of Artificial Sequence: Synthetic peptide
IPQTGTFDY

SEQ ID NO: 2975 - protein, 15 aa, Artificial Sequence
  Description of Artificial Sequence: Synthetic peptide
ANYKRELRYYYGMDV

SEQ ID NO: 2976 - protein, 11 aa, Artificial Sequence
  Description of Artificial Sequence: Synthetic peptide
ALVGATGAFDI

SEQ ID NO: 2977 - protein, 8 aa, Artificial Sequence
  Description of Artificial Sequence: Synthetic peptide
WFGEGFDP

SEQ ID NO: 2978 - protein, 17 aa, Artificial Sequence
  Description of Artificial Sequence: Synthetic peptide
VGYDSSGYYRDYYGMDV

SEQ ID NO: 2979 - protein, 13 aa, Artificial Sequence
  Description of Artificial Sequence: Synthetic peptide
MGWSSGYLGAFDI

SEQ ID NO: 2980 - protein, 13 aa, Artificial Sequence
  Description of Artificial Sequence: Synthetic peptide
GEIYYGYDGGFAY

SEQ ID NO: 2981 - protein, 8 aa, Artificial Sequence
  Description of Artificial Sequence: Synthetic peptide
DYSYAMDY

SEQ ID NO: 2982 - protein, 8 aa, Artificial Sequence
  Description of Artificial Sequence: Synthetic peptide
DYLYSLDF

SEQ ID NO: 2983 - protein, 8 aa, Artificial Sequence
  Description of Artificial Sequence: Synthetic peptide
DYLYSCDY

SEQ ID NO: 2984-2999 - skipped (16 entries)

SEQ ID NO: 3000 - protein, 11 aa, Artificial Sequence
  Description of Artificial Sequence: Synthetic peptide
RASQDIYNNLA

SEQ ID NO: 3001 - protein, 16 aa, Artificial Sequence
  Description of Artificial Sequence: Synthetic peptide
RSSQSLLHSNGYNYLD

SEQ ID NO: 3002 - protein, 11 aa, Artificial Sequence
  Description of Artificial Sequence: Synthetic peptide
GGNNIGTKSVH

SEQ ID NO: 3003 - protein, 11 aa, Artificial Sequence
  Description of Artificial Sequence: Synthetic peptide
SGDGLSKKYVS

SEQ ID NO: 3004 - protein, 11 aa, Artificial Sequence
  Description of Artificial Sequence: Synthetic peptide
RASQGIRNWLA

SEQ ID NO: 3005 - protein, 11 aa, Artificial Sequence
  Description of Artificial Sequence: Synthetic peptide
GGNNIGSKSVH

SEQ ID NO: 3006 - protein, 11 aa, Artificial Sequence
  Description of Artificial Sequence: Synthetic peptide
QGDSLGNYYAT

SEQ ID NO: 3007 - protein, 12 aa, Artificial Sequence
  Description of Artificial Sequence: Synthetic peptide
RASQSVSSAYLA

SEQ ID NO: 3008 - protein, 11 aa, Artificial Sequence
  Description of Artificial Sequence: Synthetic peptide
RASQSVSNSLA

SEQ ID NO: 3009 - protein, 12 aa, Artificial Sequence
  Description of Artificial Sequence: Synthetic peptide
RASQSVSSSFLA

SEQ ID NO: 3010 - protein, 12 aa, Artificial Sequence
  Description of Artificial Sequence: Synthetic peptide
RASQSVSTTFLA

SEQ ID NO: 3011 - protein, 11 aa, Artificial Sequence
  Description of Artificial Sequence: Synthetic peptide
RASQSISSYLN

SEQ ID NO: 3012 - protein, 12 aa, Artificial Sequence
  Description of Artificial Sequence: Synthetic peptide
RATQSIGSSFLA

SEQ ID NO: 3013 - protein, 12 aa, Artificial Sequence
  Description of Artificial Sequence: Synthetic peptide
RASQSVSSSYLA

SEQ ID NO: 3014 - protein, 12 aa, Artificial Sequence
  Description of Artificial Sequence: Synthetic peptide
RASQSVSSSYLA

SEQ ID NO: 3015 - protein, 12 aa, Artificial Sequence
  Description of Artificial Sequence: Synthetic peptide
RASQRVASNYLA

SEQ ID NO: 3016 - protein, 12 aa, Artificial Sequence
  Description of Artificial Sequence: Synthetic peptide
RASQSLSSNFLA

SEQ ID NO: 3017 - protein, 16 aa, Artificial Sequence
  Description of Artificial Sequence: Synthetic peptide
RSSQSLLHSNGYNYLD

SEQ ID NO: 3018 - protein, 12 aa, Artificial Sequence
  Description of Artificial Sequence: Synthetic peptide
RASQSVSSSYLA

SEQ ID NO: 3019 - protein, 12 aa, Artificial Sequence
  Description of Artificial Sequence: Synthetic peptide
RASQSVASSFLA

SEQ ID NO: 3020 - protein, 11 aa, Artificial Sequence
  Description of Artificial Sequence: Synthetic peptide
RASQDVNTAVS

SEQ ID NO: 3021 - protein, 15 aa, Artificial Sequence
  Description of Artificial Sequence: Synthetic peptide
RASESVSVIGAHLIH

SEQ ID NO: 3022 - protein, 15 aa, Artificial Sequence
  Description of Artificial Sequence: Synthetic peptide
RASESVTILGSHLIY

SEQ ID NO: 3023 - protein, 15 aa, Artificial Sequence
  Description of Artificial Sequence: Synthetic peptide
RASESVTILGSHLIY

SEQ ID NO: 3024 - protein, 7 aa, Artificial Sequence
  Description of Artificial Sequence: Synthetic peptide
GASRRAT

SEQ ID NO: 3025 - protein, 7 aa, Artificial Sequence
  Description of Artificial Sequence: Synthetic peptide
LGSNRAS

SEQ ID NO: 3026 - protein, 7 aa, Artificial Sequence
  Description of Artificial Sequence: Synthetic peptide
EVSNRFS

SEQ ID NO: 3027 - protein, 7 aa, Artificial Sequence
  Description of Artificial Sequence: Synthetic peptide
LGSKRAS

SEQ ID NO: 3028 - protein, 7 aa, Artificial Sequence
  Description of Artificial Sequence: Synthetic peptide
GASTLAS

SEQ ID NO: 3029 - protein, 7 aa, Artificial Sequence
  Description of Artificial Sequence: Synthetic peptide
LGSNRAS

SEQ ID NO: 3030 - protein, 7 aa, Artificial Sequence
  Description of Artificial Sequence: Synthetic peptide
GASTRAS

SEQ ID NO: 3031 - protein, 7 aa, Artificial Sequence
  Description of Artificial Sequence: Synthetic peptide
GASIRAT

SEQ ID NO: 3032 - protein, 7 aa, Artificial Sequence
  Description of Artificial Sequence: Synthetic peptide
DASNRAT

SEQ ID NO: 3033 - protein, 7 aa, Artificial Sequence
  Description of Artificial Sequence: Synthetic peptide
AASSLQS

SEQ ID NO: 3034 - skipped

SEQ ID NO: 3035 - protein, 7 aa, Artificial Sequence
  Description of Artificial Sequence: Synthetic peptide
EVSNRDS

SEQ ID NO: 3036 - protein, 7 aa, Artificial Sequence
  Description of Artificial Sequence: Synthetic peptide
DASTLQT

SEQ ID NO: 3037 - protein, 7 aa, Artificial Sequence
  Description of Artificial Sequence: Synthetic peptide
GASTRAT

SEQ ID NO: 3038 - protein, 7 aa, Artificial Sequence
  Description of Artificial Sequence: Synthetic peptide
GASSRAS

SEQ ID NO: 3039 - protein, 7 aa, Artificial Sequence
  Description of Artificial Sequence: Synthetic peptide
SATSPVP

SEQ ID NO: 3040 - protein, 7 aa, Artificial Sequence
  Description of Artificial Sequence: Synthetic peptide
AANKSQS

SEQ ID NO: 3041 - protein, 7 aa, Artificial Sequence
  Description of Artificial Sequence: Synthetic peptide
LGSNRAS

SEQ ID NO: 3042 - protein, 7 aa, Artificial Sequence
  Description of Artificial Sequence: Synthetic peptide
DDSVRPS

SEQ ID NO: 3043 - protein, 7 aa, Artificial Sequence
  Description of Artificial Sequence: Synthetic peptide
RDKERPS

SEQ ID NO: 3044 - protein, 7 aa, Artificial Sequence
  Description of Artificial Sequence: Synthetic peptide
AASNLQS

SEQ ID NO: 3045 - protein, 7 aa, Artificial Sequence
  Description of Artificial Sequence: Synthetic peptide
GKNNRPS

SEQ ID NO: 3046 - protein, 7 aa, Artificial Sequence
  Description of Artificial Sequence: Synthetic peptide
GTNNRPS

SEQ ID NO: 3047 - protein, 7 aa, Artificial Sequence
  Description of Artificial Sequence: Synthetic peptide
GASTRAT

SEQ ID NO: 3048 - protein, 7 aa, Artificial Sequence
  Description of Artificial Sequence: Synthetic peptide
DASSRAT

SEQ ID NO: 3049 - protein, 7 aa, Artificial Sequence
  Description of Artificial Sequence: Synthetic peptide
GASSRAT

SEQ ID NO: 3050 - protein, 7 aa, Artificial Sequence
  Description of Artificial Sequence: Synthetic peptide
GSSNRAT

SEQ ID NO: 3051 - protein, 7 aa, Artificial Sequence
  Description of Artificial Sequence: Synthetic peptide
AASSLQS

SEQ ID NO: 3052 - protein, 7 aa, Artificial Sequence
  Description of Artificial Sequence: Synthetic peptide
GASQRAT

SEQ ID NO: 3053 - protein, 7 aa, Artificial Sequence
  Description of Artificial Sequence: Synthetic peptide
GASSRAT

SEQ ID NO: 3054 - protein, 7 aa, Artificial Sequence
  Description of Artificial Sequence: Synthetic peptide
GASSRAT

SEQ ID NO: 3055 - protein, 7 aa, Artificial Sequence
  Description of Artificial Sequence: Synthetic peptide
GASSRAT

SEQ ID NO: 3056 - protein, 7 aa, Artificial Sequence
  Description of Artificial Sequence: Synthetic peptide
GASNWAT

SEQ ID NO: 3057 - protein, 7 aa, Artificial Sequence
  Description of Artificial Sequence: Synthetic peptide
LGSNRAS

SEQ ID NO: 3058 - protein, 7 aa, Artificial Sequence
  Description of Artificial Sequence: Synthetic peptide
GTSSRAT

SEQ ID NO: 3059 - protein, 7 aa, Artificial Sequence
  Description of Artificial Sequence: Synthetic peptide
GASGRAT

SEQ ID NO: 3060 - protein, 7 aa, Artificial Sequence
  Description of Artificial Sequence: Synthetic peptide
SASYRYT

SEQ ID NO: 3061 - protein, 7 aa, Artificial Sequence
  Description of Artificial Sequence: Synthetic peptide
LASNLET

SEQ ID NO: 3062 - protein, 7 aa, Artificial Sequence
  Description of Artificial Sequence: Synthetic peptide
LASNVQT

SEQ ID NO: 3063 - protein, 7 aa, Artificial Sequence
  Description of Artificial Sequence: Synthetic peptide
LASNVQT

SEQ ID NO: 3064 - protein, 10 aa, Artificial Sequence
  Description of Artificial Sequence: Synthetic peptide
QQYHSSPSWT

SEQ ID NO: 3065 - protein, 9 aa, Artificial Sequence
  Description of Artificial Sequence: Synthetic peptide
MQALQTPYT

SEQ ID NO: 3066 - protein, 8 aa, Artificial Sequence
  Description of Artificial Sequence: Synthetic peptide
MQNIQFPS

SEQ ID NO: 3067 - protein, 9 aa, Artificial Sequence
  Description of Artificial Sequence: Synthetic peptide
MQALQTPYT

SEQ ID NO: 3068 - protein, 8 aa, Artificial Sequence
  Description of Artificial Sequence: Synthetic peptide
QQSYKRAS

SEQ ID NO: 3069 - protein, 9 aa, Artificial Sequence
  Description of Artificial Sequence: Synthetic peptide
MQGRQFPYS

SEQ ID NO: 3070 - protein, 8 aa, Artificial Sequence
  Description of Artificial Sequence: Synthetic peptide
QQYGSSLT

SEQ ID NO: 3071 - protein, 9 aa, Artificial Sequence
  Description of Artificial Sequence: Synthetic peptide
QQYGSSSWT

SEQ ID NO: 3072 - protein, 10 aa, Artificial Sequence
  Description of Artificial Sequence: Synthetic peptide
QQYGSSPPWT

SEQ ID NO: 3073 - protein, 7 aa, Artificial Sequence
  Description of Artificial Sequence: Synthetic peptide
QQSYTLA

SEQ ID NO: 3074 - protein, 9 aa, Artificial Sequence
  Description of Artificial Sequence: Synthetic peptide
QQSYSTPYT

SEQ ID NO: 3075 - protein, 9 aa, Artificial Sequence
  Description of Artificial Sequence: Synthetic peptide
MQGTHWPGT

SEQ ID NO: 3076 - protein, 9 aa, Artificial Sequence
  Description of Artificial Sequence: Synthetic peptide
QQYESLPLT

SEQ ID NO: 3077 - protein, 10 aa, Artificial Sequence
  Description of Artificial Sequence: Synthetic peptide
QQYNDWLPVT

SEQ ID NO: 3078 - protein, 10 aa, Artificial Sequence
  Description of Artificial Sequence: Synthetic peptide
QQYAGSPPFT

SEQ ID NO: 3079 - protein, 9 aa, Artificial Sequence
  Description of Artificial Sequence: Synthetic peptide
LQHDNFPLT

SEQ ID NO: 3080 - protein, 9 aa, Artificial Sequence
  Description of Artificial Sequence: Synthetic peptide
QHYYRFPYS

SEQ ID NO: 3081 - protein, 9 aa, Artificial Sequence
  Description of Artificial Sequence: Synthetic peptide
MQALQTPYT

SEQ ID NO: 3082 - protein, 11 aa, Artificial Sequence
  Description of Artificial Sequence: Synthetic peptide
QVWDSDSEHVV

SEQ ID NO: 3083 - protein, 9 aa, Artificial Sequence
  Description of Artificial Sequence: Synthetic peptide
QAWDDTTVV

SEQ ID NO: 3084 - protein, 9 aa, Artificial Sequence
  Description of Artificial Sequence: Synthetic peptide
QKYNSAPFT

SEQ ID NO: 3085 - protein, 12 aa, Artificial Sequence
  Description of Artificial Sequence: Synthetic peptide
SSRDSSGDHLRV

SEQ ID NO: 3086 - protein, 11 aa, Artificial Sequence
  Description of Artificial Sequence: Synthetic peptide
NSRDSSGHHLL

SEQ ID NO: 3087 - protein, 14 aa, Artificial Sequence
  Description of Artificial Sequence: Synthetic peptide
QHYGSSFNGSSLFT

SEQ ID NO: 3088 - protein, 10 aa, Artificial Sequence
  Description of Artificial Sequence: Synthetic peptide
QQFGTSSGLT

SEQ ID NO: 3089 - protein, 10 aa, Artificial Sequence
  Description of Artificial Sequence: Synthetic peptide
QQYHSSPSWT

SEQ ID NO: 3090 - protein, 10 aa, Artificial Sequence
  Description of Artificial Sequence: Synthetic peptide
QQYHSSPSWT

SEQ ID NO: 3091 - protein, 9 aa, Artificial Sequence
  Description of Artificial Sequence: Synthetic peptide
QQSYSTPYS

SEQ ID NO: 3092 - protein, 10 aa, Artificial Sequence
  Description of Artificial Sequence: Synthetic peptide
QHYESSPSWT

SEQ ID NO: 3093 - protein, 10 aa, Artificial Sequence
  Description of Artificial Sequence: Synthetic peptide
QQYGSPPRFT

SEQ ID NO: 3094 - protein, 10 aa, Artificial Sequence
  Description of Artificial Sequence: Synthetic peptide
QHYGSSPSWT

SEQ ID NO: 3095 - protein, 10 aa, Artificial Sequence
  Description of Artificial Sequence: Synthetic peptide
QHYDSSPSWT

SEQ ID NO: 3096 - protein, 10 aa, Artificial Sequence
  Description of Artificial Sequence: Synthetic peptide
QYYGTSPMYT

SEQ ID NO: 3097 - protein, 9 aa, Artificial Sequence
  Description of Artificial Sequence: Synthetic peptide
MQALQTPLT

SEQ ID NO: 3098 - protein, 11 aa, Artificial Sequence
  Description of Artificial Sequence: Synthetic peptide
QHYGNSPPKFT

SEQ ID NO: 3099 - protein, 10 aa, Artificial Sequence
  Description of Artificial Sequence: Synthetic peptide
QHYGGSPRLT

SEQ ID NO: 3100 - protein, 9 aa, Artificial Sequence
  Description of Artificial Sequence: Synthetic peptide
QQHYSTPWT

SEQ ID NO: 3101 - protein, 9 aa, Artificial Sequence
  Description of Artificial Sequence: Synthetic peptide
LQSRIFPRT

SEQ ID NO: 3102 - protein, 9 aa, Artificial Sequence
  Description of Artificial Sequence: Synthetic peptide
LQSRTIPRT

SEQ ID NO: 3103 - protein, 9 aa, Artificial Sequence
  Description of Artificial Sequence: Synthetic peptide
LQSRTIPRT

SEQ ID NO: 3104-3983 - skipped (880 entries)

SEQ ID NO: 3984 - protein, 12 aa, Artificial Sequence
  Description of Artificial Sequence: Synthetic peptide
RASQSISSSFLA

SEQ ID NO: 3985 - protein, 16 aa, Artificial Sequence
  Description of Artificial Sequence: Synthetic peptide
RSSQSLLHSNGYNYLD

SEQ ID NO: 3986 - protein, 16 aa, Artificial Sequence
  Description of Artificial Sequence: Synthetic peptide
KSSQSLLRNDGKTPLY

SEQ ID NO: 3987 - protein, 16 aa, Artificial Sequence
  Description of Artificial Sequence: Synthetic peptide
RSSQSLLHSNGYNYLN

SEQ ID NO: 3988 - protein, 11 aa, Artificial Sequence
  Description of Artificial Sequence: Synthetic peptide
RASQSISSYLN

SEQ ID NO: 3989 - protein, 16 aa, Artificial Sequence
  Description of Artificial Sequence: Synthetic peptide
RSSQSLLYSNGYNYVD

SEQ ID NO: 3990 - protein, 11 aa, Artificial Sequence
  Description of Artificial Sequence: Synthetic peptide
RASQSVSSNLA

SEQ ID NO: 3991 - protein, 11 aa, Artificial Sequence
  Description of Artificial Sequence: Synthetic peptide
RASQSVSSKLA

SEQ ID NO: 3992 - protein, 12 aa, Artificial Sequence
  Description of Artificial Sequence: Synthetic peptide
RASQSVGSTNLA

SEQ ID NO: 3993 - protein, 11 aa, Artificial Sequence
  Description of Artificial Sequence: Synthetic peptide
RASQSISSYLN

SEQ ID NO: 3994 - protein, 11 aa, Artificial Sequence
  Description of Artificial Sequence: Synthetic peptide
RASQSISSYLN

SEQ ID NO: 3995 - protein, 16 aa, Artificial Sequence
  Description of Artificial Sequence: Synthetic peptide
KSSESLVHNSGKTYLN

SEQ ID NO: 3996 - protein, 11 aa, Artificial Sequence
  Description of Artificial Sequence: Synthetic peptide
QASEDINKFLN

SEQ ID NO: 3997 - protein, 11 aa, Artificial Sequence
  Description of Artificial Sequence: Synthetic peptide
RASQSVGSNLA

SEQ ID NO: 3998 - protein, 12 aa, Artificial Sequence
  Description of Artificial Sequence: Synthetic peptide
RASQSIGSSSLA

SEQ ID NO: 3999 - protein, 11 aa, Artificial Sequence
  Description of Artificial Sequence: Synthetic peptide
KASQDIDDAMN

SEQ ID NO: 4000 - protein, 5 aa, Artificial Sequence
  Description of Artificial Sequence: Synthetic peptide
GGGGS

SEQ ID NO: 4001 - RNA, 2000 nt, Artificial Sequence; identical to SEQ ID NO: 118
  Description of Artificial Sequence: Synthetic polynucleotide
  misc_feature (1)..(2000): This sequence may encompass 50-2000 nucleotides

SEQ ID NO: 4002 - protein, 30 aa, Artificial Sequence; identical to SEQ ID NO: 53
  Description of Artificial Sequence: Synthetic polypeptide
  MISC_FEATURE (1)..(30): This sequence may encompass 1-6 "Gly Gly Gly Gly Ser" repeating units

SEQ ID NO: 4003 - protein, 119 aa, Artificial Sequence
  Description of Artificial Sequence: Synthetic polypeptide
QVQLLESGAELVRPGSSVKISCKASGYAFSSYWMNWVKQRPGQGLEWIGQIYPGDGDTNYNGKFKGQATLTADKSSSTAYMQLSGLTSEDSAVYSCARKTISSVVDFYFDYWGQGTTVT

SEQ ID NO: 4004 - protein, 111 aa, Artificial Sequence
  Description of Artificial Sequence: Synthetic polypeptide
ELVLTQSPKFMSTSVGDRVSVTCKASQNVGTNVAWYQQKPGQSPKPLIYSATYRNSGVPDRFTGSGSGTDFTLTITNVQSKDLADYFYFCQYNRYPYTSGGGTKLEIKRRS

1. A method of treating a subject comprising administering to the subject a CAR-expressing cell therapy, e.g., a CAR19 expressing cell therapy, wherein the CAR-expressing cell therapy is administered less than 30 days, e.g., less than 29, 28, 27, 26, 25, 24, 23, 22, 21, 20, 19, 18, 17, 16, 15, 14, 13, 12, 11, 10, 9, 8, 7, 6, 5, 4, 3, 2, or 1 days, after administration of a lymphodepleting therapy comprising radiotherapy.

2. A method of treating, e.g., preventing, cytokine release syndrome (CRS) with a CAR-expressing cell therapy, e.g., a CAR19 expressing cell therapy, in a subject in need thereof, comprising administering to the subject a lymphodepleting therapy comprising radiotherapy, thereby preventing CRS in the subject.

3. The method of claim 2, wherein the radiotherapy is administered less than 30 days, e.g., less than 29, 28, 27, 26, 25, 24, 23, 22, 21, 20, 19, 18, 17, 16, 15, 14, 13, 12, 11, 10, 9, 8, 7, 6, 5, 4, 3, 2, or 1 days, prior to the administration of the CAR-expressing cell therapy.

4. The method of claim 2, wherein the subject (i) is at risk of developing, has, or is diagnosed with CRS; (ii) is identified or has previously been identified as being at risk for CRS; and/or (iii) has been, is being, or will be administered a CAR therapy, e.g., a CD19 CAR-expressing cell.

5. The method of claim 2, wherein the subject is selected based on
(i) risk of developing CRS, and/or
(ii) whether the subject has been, is being, or will be administered a CAR therapy (e.g., CD19 CAR-expressing cell).

6. The method of claim 2, wherein the subject is selected for administration of radiotherapy (i) if the subject is at risk of developing CRS or (ii) if the subject will be administered a CAR therapy, e.g., a CD19 CAR-expressing cell.

7. (canceled)

8. The method of claim 2, wherein the CRS is (i) a severe CRS, e.g., grade 4 or 5 CRS or (ii) a less than severe CRS, e.g., grade 1, 2, or 3 CRS.

9. (canceled)

10. A method of treating a subject comprising administering to the subject a CAR-expressing cell therapy, e.g., a CAR19 expressing cell therapy, wherein the CAR-expressing cell therapy is administered after stem cell therapy (SCT), e.g., autologous SCT or allogeneic SCT, wherein the subject has not responded, e.g., relapsed, to the SCT therapy, thereby treating the subject.

11. The method of claim 10, wherein the CAR-expressing cell therapy is administered after relapse from SCT, e.g., about 1-6 months (e.g., about 1.1-1.5, 1.5-2.0, 2.0-2.5, 2.5-3, 3-3.5, 3.5-4, 4-4.5. 4.5-5, 5-5.5, or 5.5-6 months) after relapse.

12. The method of claim 10, wherein the subject has a response, e.g., remission, a complete response, or a partial response, to the CAR-expressing cell therapy; optionally wherein the subject in remission has a minimal residual disease (MRD) negative remission, e.g., MRD negative bone marrow remission.

13. (canceled)

14. The method of claim 10, wherein:
(i) the SCT is allogeneic SCT; or
(ii) the SCT is administered as a first-line therapy or second-line therapy.

15. (canceled)

16. The method of claim 10, wherein the subject is administered SCT, e.g., alloSCT, in first complete remission (CR1); optionally wherein the subject is in (i) first relapse after SCT or (ii) a 2nd relapse or more, e.g., 3^{rd}, 4^{th} or 5^{th} relapse.

17. (canceled)

18. (canceled)

19. The method of claim 10, wherein the subject
(i) had been previously administered a chemotherapy, e.g., as described herein;
(ii) is a pediatric patient e.g., aged about 18 years of age or younger (e.g., 18, 17, 16, 15, 14, 13, 12, 11, 10, 9, 8, 7, 6, 5, 4, 3, 2, 1 or younger (e.g., 12 months, 6 months, 3 months or less));
(iii) is a young adult (e.g., aged about 18-35 years); or
(iv) is an adolescent, e.g., aged about 10-19 years, e.g., about 10, 11, 12, 13, 14, 15, 16, 17, 18 or 19 years);
optionally wherein the subject is a mammal, e.g., a human.

20-22. (canceled)

23. The method of claim 10, wherein no response to, or relapse from SCT is determined by evaluating the presence, e.g., reappearance, of cancer cells in the subject, e.g., in the blood or bone marrow; optionally wherein the presence, e.g., reappearance, of cancer cells comprises detection of the cancer cells at or above a threshold, e.g., above 20%, 1%, 10%, 5%, 4%, 3%, 2%, or 1%.

24. (canceled)

25. The method of claim 1, wherein:
(i) the CAR-expressing cell therapy, e.g., CAR19 expressing cell therapy, comprises a plurality of cells;
(ii) the CAR-expressing cell therapy, e.g., CAR19 expressing cell therapy, is administered in a single infusion or a split-dose infusion; or
(iii) the CAR19-expressing cell therapy is administered at a dosage of about 1×10⁸, 2×10⁸, 3×10⁸, 4×10⁸, 5×10⁸, 6×10⁸, 7×10⁸, 8×10⁸, or 9×10⁸ cells, e.g., about 5×10⁸ cells, e.g., about 5×10⁸ cells in a single infusion.

26-28. (canceled)

29. The method of claim 1, wherein the CAR19-expressing cell therapy comprises:
(a) a cell (e.g., a population of cells) expressing a murine CAR molecule that binds to CD19 comprising:
(i) one or more of (e.g., all three of) heavy chain complementary determining region 1 (HCDR1), HCDR2, and HCDR3 of any CD19 scFv domain amino acid sequence listed in Table 3 and one or more of (e.g., all three of) light chain complementary determining region 1 (LCDR1), LCDR2, and LCDR3 of any CD19 scFv domain amino acid sequence listed in Table 3;
(ii) a heavy chain variable region (VH) of any CD19 scFv domain amino acid sequence listed in Table 3 and a light chain variable region (VL) of any CD19 scFv domain amino acid sequence listed in Table 3;
(iii) a CD19 scFv domain amino acid sequence listed in Table 3 (e.g., SEQ ID NO: 59, 109, 111, or 114); or
(iv) a full-length CD19 CAR amino acid sequence listed in Table 3 (e.g., SEQ ID NO: 110, 112, 113, or 115, or residues 22-486 of SEQ ID NO: 58); or
(b) a cell expressing a humanized CAR molecule that binds to CD19 comprising:
(i) one or more of (e.g., all three of) heavy chain complementary determining region 1 (HCDR1), HCDR2, and HCDR3 of any CD19 scFv domain amino acid sequence listed in Table 2 and one or more of (e.g., all three of) light chain complementary determining region 1 (LCDR1), LCDR2, and LCDR3 of any CD19 scFv domain amino acid sequence listed in Table 2;
(ii) a heavy chain variable region (VH) of any CD19 scFv domain amino acid sequence listed in Table 2 and a light chain variable region (VL) of any CD19 scFv domain amino acid sequence listed in Table 2;
(iii) a CD19 scFv domain amino acid sequence listed in Table 2 (e.g., any one of SEQ ID NOs: 1-12); or
(iv) a full-length CD19 CAR amino acid sequence listed in Table 2 (e.g., residues 22-486 of any one of SEQ ID NOs: 31-34 or 42, or residues 22-491 of any one of SEQ ID NOs: 35-41).

30. (canceled)

31. The method of claim 29, wherein the CAR molecule comprises:
(i) a scFv;
(ii) a transmembrane domain that comprises a transmembrane domain of a protein selected from the group consisting of the alpha, beta or zeta chain of the T-cell receptor, CD28, CD3 epsilon, CD45, CD4, CD5, CD8, CD9, CD16, CD22, CD33, CD37, CD64, CD80, CD86, CD134, CD137 and CD154;
(iii) a hinge region comprising SEQ ID NO:14, or a sequence with 95-99% identity thereof;
(iv) a costimulatory domain that is a functional signaling domain obtained from a protein selected from the group consisting of OX40, CD2, CD27, CD28, CDS, ICAM-1, LFA-1 (CD11a/CD18), ICOS (CD278), and 4-1BB (CD137), wherein optionally the costimulatory domain comprises the amino acid sequence of SEQ ID NO:16 or 51;
(v) an intracellular signaling domain comprising a functional signaling domain of 4-1BB and/or a functional signaling domain of CD3 zeta; e.g., an intracellular signaling domain comprising the sequence of SEQ ID NO: 16 and/or the sequence of SEQ ID NO:17 or 43; or
(vi) a leader sequence, optionally wherein the leader sequence comprises the amino acid sequence of SEQ ID NO: 13.

32. The method of claim 1, wherein the cell comprising a CAR comprises a nucleic acid encoding the CAR; optionally wherein the nucleic acid encoding the CAR is a lentiviral vector or an RNA, e.g., an in vitro transcribed RNA; and/or optionally wherein the nucleic acid encoding the CAR is introduced into the cells by lentiviral transduction or by electroporation.

33-36. (canceled)

37. The method of claim 1, wherein the cell (e.g., population of cells) is a T cell or NK cell; optionally wherein the T cell is an autologous or allogeneic T cell.

38. (canceled)

39. (canceled)

40. The method of claim 1, wherein the subject has a cancer, e.g., a solid tumor or a hematological cancer, e.g., a lymphoma or a leukemia; optionally wherein the cancer is a hematological cancer chosen from acute leukemia, B-cell acute lymphoid leukemia (B-ALL), T-cell acute lymphoid leukemia (T-ALL), small lymphocytic leukemia (SLL), acute lymphoid leukemia (ALL), chronic leukemia, chronic myelogenous leukemia (CML), chronic lymphocytic leukemia (CLL), non-Hodgkin lymphoma (NHL), e.g., relapsed/refractory NHL, or multiple myeloma.

41-43. (canceled)
